(19) United States
(12) Patent Application Publication
(10) Pub. No.: US 2023/0040715 A1
(43) Pub. Date: Feb. 9, 2023

(54) PROTEINS COMPRISING CD3 ANTIGEN BINDING DOMAINS AND USES THEREOF

(71) Applicant: Janssen Biotech, Inc., Horsham, PA (US)

(72) Inventors: Adam Zwolak, Bala Cynwyd, PA (US); Raymond Brittingham, Blue Bell, PA (US); Scott R. Brodeur, New Hope, PA (US); Rajkumar Ganesan, Thousand Oaks, CA (US); Sherry Lynn La Porte, Horsham, PA (US); Jinquan Luo, Malvern, PA (US); Fang Yi, Collegeville, PA (US); Colleen M. Kane, Flourtown, PA (US); Triveni K. Bhatt, Perkasie, PA (US)

(21) Appl. No.: 17/701,764

(22) Filed: Mar. 23, 2022

Related U.S. Application Data
(60) Provisional application No. 63/165,184, filed on Mar. 24, 2021.

(51) Int. Cl. C07K 16/28; C07K 16/46; C12N 15/85

(52) U.S. Cl. CPC C07K 16/2809; C07K 16/468; C12N 15/85; A61K 2039/507

(57) ABSTRACT

The disclosure provides antigen binding domains that bind cluster of differentiation 3 (CD3) protein, comprising the antigen binding domains that bind CD3ε, polynucleotides encoding them, vectors, host cells, methods of making and using them.

### CROSS-REFERENCE TO RELATED APPLICATIONS

[0001] This application claims priority to U.S. Provisional Application Ser. No. 63/165,184, filed 24 Mar. 2021. The entire contents of the aforementioned application are incorporated herein by reference in its entirety.

### REFERENCE TO SEQUENCE LISTING SUBMITTED ELECTRONICALLY

[0002] This application contains a sequence listing, which is submitted electronically via EFS-Web as an ASCII formatted sequence listing with a file name “JBI6516USNP1_SL.txt”, creation date of Mar. 17, 2022 and having a size of 1,282 KB. The sequence listing submitted via EFS-Web is part of the specification and is herein incorporated by reference in its entirety.

### TECHNICAL FIELD

[0003] The disclosure provides antigen binding domains that bind cluster of differentiation 3 (CD3) protein comprising the antigen binding domains that bind CD3, polynucleotides encoding them, vectors, host cells, methods of making and using them.

### BACKGROUND

[0004] Bispecific antibodies and antibody fragments have been explored as a means to recruit cytolytic T cells to kill tumor cells. However, the clinical use of many T cell-recruiting bispecific antibodies has been limited by challenges including unfavorable toxicity, potential immunogenicity, and manufacturing issues. There thus exists a considerable need for improved bispecific antibodies that recruit cytolytic T cells to kill tumor cells that include, for example, reduced toxicity and favorable manufacturing profiles.

[0005] The human CD3 T cell antigen receptor protein complex is composed of six distinct chains: a CD3γ chain (SwissProt P09693), a CD3δ chain (SwissProt P04234), two CD3ε chains (SwissProt P07766), and one CD3ζ chain homodimer (SwissProt P20963) (εγ:εδ:ζζ), which is associated with the T cell receptor α and β chain. This complex plays an important role in coupling antigen recognition to several intracellular signal-transduction pathways. The CD3 complex mediates signal transduction, resulting in T cell activation and proliferation. CD3 is required for immune response.

[0006] Redirection of cytotoxic T cells to kill tumor cells has become an important therapeutic mechanism for numerous oncologic indications (Labrijn, A. F., Janmaat, M. L., Reichert, J. M. & Parren, P. Bispecific antibodies: a mechanistic review of the pipeline. Nat Rev Drug Discov 18, 585-608, doi:10.1038/s41573-019-0028-1 (2019)). T cell activation follows a two-signal hypothesis, in which the first signal is supplied by engagement of the T cell receptor (TCR) complex with its cognate peptide MHC complex on an antigen presenting cell (APC), and the second signal may be either co-stimulatory or co-inhibitory (Chen, L. & Flies, D. B. Molecular mechanisms of T cell co-stimulation and co-inhibition. Nat Rev Immunol 13, 227-242, doi:10.1038/nri3405 (2013)). Tumors often fail to present sufficient non-self antigens to induce a T cell-based immune response, and T cell-engaging BsAbs (bsTCE) can overcome this challenge by inducing T cell activation in the absence of TCR-pMHC interaction. T cell receptor signaling occurs through the ITAM motifs in the cytoplasmic region of the CD3 subunits of the TCR (Chen, D. S. & Mellman, I. Oncology meets immunology: the cancer-immunity cycle. Immunity 39, 1-10, doi:10.1016/j.immuni.2013.07.012 (2013)). In particular, the CD3ε subunit is present in two copies per TCR complex and represents an attractive antigen for T cell engagement. Indeed, numerous bsTCE that target CD3ε have shown clinical anti-tumor efficacy where mAbs have failed, and significant pharmaceutical development efforts are ongoing for several tumor targets (Labrijn, A. F. et al., 2019). Three major challenges for clinical development of bsTCE are 1) the potential for rapid and severe toxicity associated with cytokine release via systemic or off-tumor T cell activation, 2) practical challenges of formulation and dosing for bsTCE with high potency and sharp therapeutic indices, and 3) the potential for reactivation-induced T cell death, wherein tumor-infiltrating T cells (TILS) undergo apoptosis in response to over-activation by bsTCE (Wu, Z. & Cheung, N. V. T cell engaging bispecific antibody (T-BsAb): From technology to therapeutics. Pharmacol Ther 182, 161-175, doi:10.1016/j.pharmthera.2017.08.005 (2018)).

[0007] Together, these observations suggest that there is a need in the art for novel CD3 specific binding proteins that are more advantageous and can be used to treat cancers.

### SUMMARY

[0008] The disclosure satisfies this need, for example, by providing novel CD3ε specific binding proteins that possess high affinity for the tumor antigen and weak affinity for the T cell. The proteins comprising an antigen binding domain that binds CD3ε of the disclosure were generated to have high thermostability, reduced deamidation risk, and humanized to decrease immunogenicity.

[0009] In certain embodiments, the disclosure provides an isolated protein comprising an antigen binding domain that binds to cluster of differentiation 3ε (CD3ε), wherein the antigen binding domain that binds CD3ε comprises: an isolated protein comprising an antigen binding domain that binds to cluster of differentiation 3ε (CD3ε), wherein the antigen binding domain that binds CD3ε comprises:

[0010] a heavy chain complementarity determining region (HCDR) 1, a HCDR2 and a HCDR3 of a heavy chain variable region (VH) of SEQ ID NO: 55 and a light chain complementarity determining region (LCDR) 1, a LCDR2 and a LCDR3 of a light chain variable region (VL) of SEQ ID NO: 59;

[0011] the HCDR1, the HCDR2 and the HCDR3 of the VH of SEQ ID NO: 55 and the LCDR1, the LCDR2 and the LCDR3 of the VL of SEQ ID NO: 58;

[0012] the HCDR1, the HCDR2 and the HCDR3 of the VH of SEQ ID NO: 54 and the LCDR1, the LCDR2 and the LCDR3 of the VL of SEQ ID NO: 56; or

[0013] the HCDR1, the HCDR2 and the HCDR3 of the VH of SEQ ID NO: 48 and the LCDR1, the LCDR2 and the LCDR3 of the VL of SEQ ID NO: 58;

[0014] wherein the amino acid in position N106 of SEQ ID NO: 55, 54, or 48 is optionally substituted with the amino acid selected from the group consisting of A, G, S, F, E, T, R, V, I, Y, L, P, Q, and K, wherein the residue numbering starts from N-terminus of SEQ ID NO: 55, 54, or 48.

[0015] In certain embodiments, the disclosure also provides an isolated protein, comprising the HCDR1, the HCDR2, the HCDR3, the LCDR1, the LCDR2 and the LCDR3 of SEQ ID NOs: 70, 71, 86, 79, 80, and 81, respectively.

[0016] In other embodiments, the HCDR1, the HCDR2, the HCDR3, the LCDR1, the LCDR2 and the LCDR3 comprise

[0017] SEQ ID NOs: 70, 71, 72, 79, 80, and 81, respectively;

[0018] SEQ ID NOs: 70, 71, 87, 79, 80, and 81, respectively; or

[0019] SEQ ID NOs: 70, 71, 90, 79, 80, and 81, respectively.

[0020] In other embodiments, the antigen binding domain that binds CD3ε is a scFv, a (scFv)2, a Fv, a Fab, a F(ab′)2, a Fd, a dAb or a VHH.

[0021] In other embodiments, the antigen binding domain that binds CD3ε is the Fab.

[0022] In other embodiments, the antigen binding domain that binds CD3ε is the scFv.

[0023] In other embodiments, the scFv comprises, from the N- to C-terminus, a VH, a first linker (L1) and a VL (VH-L1-VL) or the VL, the L1 and the VH (VL-L1-VH).

[0024] In other embodiments, the L1 comprises

[0025] about 5-50 amino acids;

[0026] about 5-40 amino acids;

[0027] about 10-30 amino acids; or about 10-20 amino acids.

[0028] In other embodiments, the L1 comprises an amino acid sequence of SEQ ID NOs: 3-36.

[0029] In other embodiments, the L1 comprises the amino acid sequence of SEQ ID NO: 3.

[0030] In other embodiments, the antigen binding domain that binds CD3ε comprises the VH of SEQ ID NOs: 55, 54, or 48 and the VL of SEQ ID NOs: 59, 58 or 56.

[0031] In other embodiments, the antigen binding domain that binds CD3ε comprises:

[0032] the VH of SEQ ID NO: 55 and the VL of SEQ ID NO: 59;

[0033] the VH of SEQ ID NO: 55 and the VL of SEQ ID NO: 58;

[0034] the VH of SEQ ID NO: 54 and the VL of SEQ ID NO: 56;

[0035] the VH of SEQ ID NO: 48 and the VL of SEQ ID NO: 58

[0036] the VH of SEQ ID NO: 88 and the VL of SEQ ID NO: 58; or

[0037] the VH of SEQ ID NO: 242 and the VL of SEQ ID NO: 58.

[0038] In other embodiments, the antigen binding domain that binds CD3ε comprises an amino acid sequence selected from the group consisting of SEQ ID NOs: 96-126.

[0039] In other embodiments, the isolated protein is a multispecific protein.

[0040] In other embodiments, the multispecific protein is a bispecific protein.

[0041] In other embodiments, the multispecific protein is a trispecific protein.

[0042] In other embodiments, the isolated protein further comprises an immunoglobulin (Ig) constant region or a fragment of the Ig constant region thereof.

[0043] In other embodiments, the fragment of the Ig constant region comprises a Fc region.

[0044] In other embodiments, the fragment of the Ig constant region comprises a CH2 domain.

[0045] In other embodiments, the fragment of the Ig constant region comprises a CH3 domain.

[0046] In other embodiments, the fragment of the Ig constant region comprises a CH2 domain and a CH3 domain.

[0047] In other embodiments, the fragment of the Ig constant region comprises at least portion of a hinge, a CH2 domain and a CH3 domain.

[0048] In other embodiments, the fragment of the Ig constant region comprises a hinge, a CH2 domain and a CH3 domain.

[0049] In other embodiments, the antigen binding domain that binds CD3ε is conjugated to the N-terminus of the Ig constant region or the fragment of the Ig constant region.

[0050] In other embodiments, the antigen binding domain that binds CD3ε is conjugated to the C-terminus of the Ig constant region or the fragment of the Ig constant region.

[0051] In other embodiments, the antigen binding domain that binds CD3ε is conjugated to the Ig constant region or the fragment of the Ig constant region via a second linker (L2).

[0052] In other embodiments, the L2 comprises the amino acid sequence selected from the group consisting of SEQ ID NOs: 3-36.

[0053] In other embodiments, the multispecific protein comprises an antigen binding domain that binds an antigen other than CD3ε.

[0054] In other embodiments, the cell antigen is a tumor associated antigen.

[0055] In other embodiments, the Ig constant region or the fragment of the Ig constant region is an IgG1, an IgG2, an IgG3 or an IgG4 isotype.

[0056] In other embodiments, the Ig constant region or the fragment of the Ig constant region comprises at least one mutation that results in reduced binding of the protein to a Fcγ receptor (FcγR).

[0057] In other embodiments, the at least one mutation that results in reduced binding of the protein to the FcγR is selected from the group consisting of F234A/L235A, L234A/L235A, L234A/L235A/D265S, V234A/G237A/P238S/H268A/V309L/A330S/P331S, F234A/L235A, S228P/F234A/L235A, N297A, V234A/G237A, K214T/E233P/L234V/L235A/G236-deleted/A327G/P331A/D365E/L358M, H268Q/V309L/A330S/P331S, S267E/L328F, L234F/L235E/D265A, L234A/L235A/G237A/P238S/H268A/A330S/P331S, S228P/F234A/L235A/G237A/P238S and S228P/F234A/L235A/G236-deleted/G237A/P238S, wherein residue numbering is according to the EU index.

[0058] In other embodiments, the FcγR is FcγRI, FcγRIIA, FcγRIIB or FcγRIII, or any combination thereof.

[0059] In other embodiments, the protein comprises at least one mutation in a CH3 domain of the Ig constant region.

[0060] In other embodiments, the at least one mutation in the CH3 domain of the Ig constant region is selected from the group consisting of T350V, L351Y, F405A, Y407V, T366Y, T366W, T366L, T366L, F405W, T394W, K392L, T394S, T394W, Y407T, Y407A, T366S/L368A/Y407V, L351Y/F405A/Y407V, T366I/K392M/T394W, F405A/Y407V, T366L/K392M/T394W, T366L/K392L/T394W, L351Y/Y407A, L351Y/Y407V, T366A/K409F, T366V/K409F, T366A/K409F, T350V/L351Y/F405A/Y407V and T350V/T366L/K392L/T394W, wherein residue numbering is according to the EU index.

[0061] The disclosure also provides a pharmaceutical composition comprising the isolated protein and a pharmaceutically acceptable carrier.

[0062] The disclosure also provides a polynucleotide encoding the isolated protein.

[0063] The disclosure also provides a vector comprising the polynucleotide.

[0064] The disclosure also provides a host cell comprising the vector.

[0065] The disclosure also provides a method of producing the isolated protein, comprising culturing the host cell in conditions that the protein is expressed, and recovering the protein produced by the host cell.

[0066] The disclosure also provides a method of treating a cancer in a subject, comprising administering a therapeutically effective amount of the isolated protein to the subject in need thereof to treat the cancer.

[0067] The disclosure also provides an anti-idiotypic antibody binding to the isolated protein.

[0068] The disclosure also provides an isolated protein of any one of claims 1-35 comprising an amino acid sequence selected from the group consisting of SEQ ID NOs: 127-157.

[0069] The disclosure also provides an isolated protein comprising an antibody heavy chain of SEQ ID NO: 224 and antibody light chain of SEQ ID NO: 226.

### BRIEF DESCRIPTIONS OF THE DRAWINGS

[0070] The summary, as well as the following detailed description, is further understood when read in conjunction with the appended drawings. For the purpose of illustrating the disclosed antibodies and methods, there are shown in the drawings exemplary embodiments of the antibodies and methods; however, antibodies and methods are not limited to the specific embodiments disclosed. In the drawings:

[0071] FIG. 1 shows binding of murine Cris-7 (CD3B1127 and CD31128) and human germline-grafted Cris-7 variant sequences in scFv format, as determined by ELISA.

[0072] FIGS. 2A and 2B show % of E. coli-expressed scFv clones retaining at least 75% of binding, determined by ELISA, after the heat shock of 60° C. for the humanized VH pared with murine VL (2A) or for the humanized VL paired with murine VH (2B); numbers on the X-axis show the residue positions.

[0073] FIG. 3 shows ELISA-based comparison of the binding abilities of humanized CD3 specific scFvs containing human-to-mouse back mutations.

[0074] FIG. 4 shows binding of CD3B2030 variants, formatted as scFvs, to recombinant CD3 (TRCW5), determined by ELISA; “NtoX” indicates the amino acid substitutions made in position 106 of the VH (SEQ ID NO: 55), wherein “X” is the amino acid indicated on the Figure.

[0075] FIG. 5 shows hydrogen-deuterium exchange rates determined using hydrogen-deuterium exchange mass spectrometry (HDX-MS) measured for the complex of Cris7 (either bi-valent or monovalent) bound to human CD3ε, or the complex of OKT3 bound to human CD3ε (CD3ε:OKT3) (fragment of CD3ε (SEQ ID No: 1) is shown). Underline indicates segments with >30% decrease in deuteration levels in the presence of the antibody, as compared to CD3ε alone. FIG. 5 discloses SEQ ID NOS 1508, 1509, 1509 and 1509, respectively, in order of appearance.

[0076] FIG. 6. Depiction of a exemplary CD79b×CD20×CD3 trispecific antibody.

[0077] FIGS. 7A-7D. Binding affinities of selected CD79b×CD3 bsAbs in the HLB-1 cell line (FIG. 7A); the OCI-LY10 cell line (FIG. 7B); the Carnaval cell line (FIG. 7C); and the WILL-2 cell line (FIG. 7D). Circles correspond to the 79C3B646 bsAb; triangles correspond to the 79C3B651 bsAb; and diamonds correspond to the 79C3B601 bsAb.

[0078] FIGS. 8A-8D. Binding affinities of selected CD79b×CD20×CD3 trispecific antibodies in the HLB-1 cell line (FIG. 8A); the OCI-LY10 cell line (FIG. 8B); the Carnaval cell line (FIG. 8C); and the WILL-2 cell line (FIG. 8D). Solid circles correspond to the 79C3B646 bsAb control; solid triangles correspond to the 79C3B651 bsAb control; and solid diamonds correspond to the 79C3B601 bsAb control. Open triangles correspond to trispecific antibody C923B38; open diamonds correspond to trispecific antibody C923B74; asterisks correspond to trispecific antibody C923B9; and X corresponds to control null trispecific antibody C923B98.

[0079] FIGS. 9A-9I. Binding kinetics of selected CD79b×CD3 bsAbs on DLBCL cell lines. Binding kinetics of the three selected bsAbs in HBL-1 cells at 300 nm (FIG. 9A). Binding kinetics of the three selected bsAbs in HBL-1 cells at 60 nm (FIG. 9B). Binding kinetics of the three selected bsAbs in HBL-1 cells at 12 nm (FIG. 9C). Binding kinetics of the three selected bsAbs in Carnaval cells at 300 nm (FIG. 9D). Binding kinetics of the three selected bsAbs in Carnaval cells at 60 nm (FIG. 9E). Binding kinetics of the three selected bsAbs in Carnaval cells at 12 nm (FIG. 9F). Binding kinetics of the three selected bsAbs in OCI-LY10 cells at 300 nm (FIG. 9G). Binding kinetics of the three selected bsAbs in OCI-LY10 cells at 60 nm (FIG. 9H). Binding kinetics of the three selected bsAbs in OCI-LY10 cells at 12 nm (FIG. 9I). Inverted triangles correspond to the 79C3B646 bsAb; diamonds correspond to the 79C3B651 bsAb; and squares correspond to the 79C3B601 bsAb.

[0080] FIGS. 10A-10I. Binding kinetics of selected CD79b×CD20×CD3 trispecific antibodies on DLBCL cell lines. Binding kinetics of the selected antibodies in HBL-1 cells at 300 nm (FIG. 10A). Binding kinetics of the selected antibodies in HBL-1 cells at 60 nm (FIG. 10B). Binding kinetics of the selected antibodies in HBL-1 cells at 12 nm (FIG. 10C). Binding kinetics of the selected antibodies in Carnaval cells at 300 nm (FIG. 10D). Binding kinetics of the selected antibodies in Carnaval cells at 60 nm (FIG. 10E). Binding kinetics of the selected antibodies in Carnaval cells at 12 nm (FIG. 10F). Binding kinetics of the selected antibodies in OCI-LY10 cells at 300 nm (FIG. 10G). Binding kinetics of the selected antibodies in OCI-LY10 cells at 60 nm (FIG. 10H). Binding kinetics of the selected antibodies in OCI-LY10 cells at 12 nm (FIG. 10I). Inverted triangles correspond to the 79C3B646 bsAb control; diamonds correspond to the 79C3B651 bsAb control; and squares correspond to the 79C3B601 bsAb control. Triangles correspond to trispecific antibody C923B38; circles correspond to trispecific antibody C923B74; squares correspond to trispecific antibody C923B99; and asterisks correspond to control null trispecific antibody C923B98.

[0081] FIGS. 11A-11D. Primary pan T-cell binding of CD79b×CD20×CD3 trispecific antibodies and CD79b×CD3 bispecific antibodies. Binding kinetics of the selected antibodies in pan T-cell donor line D221837 (FIG. 11A). Binding kinetics of the selected antibodies in pan T-cell donor line D329312 (FIG. 11B). Binding kinetics of the selected antibodies in pan T-cell donor line D329335 (FIG. 11C). Binding kinetics of the selected antibodies in pan T-cell donor line D160115 (FIG. 11D). Circles correspond to the 79C3B651 bsAb; squares correspond to the 79C3B646 bsAb; triangles correspond to the trispecific antibody C923B38; inverted triangles correspond to the trispecific antibody C923B99; diamonds correspond to the trispecific antibody C923B74.

[0082] FIGS. 12A-12B. T cell cytotoxicity of CD79b×CD20×CD3 trispecific antibodies and CD79b×CD3 bispecific antibodies. Cytotoxicity of the selected antibodies in the HEL T-cell line (FIG. 12A). Cytotoxicity of the selected antibodies in the K562 T-cell line (FIG. 12B). Shaded circles correspond to the trispecific antibody C923B74; clear circles correspond to the trispecific antibody C923B99; triangles correspond to the trispecific antibody C923B38; inverted triangles correspond to the 79C3B646 bsAb; diamonds correspond to 79C3B651 bsAb; black squares correspond to the 79C3B601 bsAb; and white squares correspond to C923B98 bsAb.

[0083] FIGS. 13A-13C. CD79b×CD20×CD3 trispecific construct mediated B cell cytotoxicity and T cell activation. Cytotoxicity in B cells (FIG. 13A); CD4⁺ T-cells (FIG. 13B) and CD8⁺ T-cells are shown for the lead antibodies.

[0084] FIG. 14 shows HDX-MS epitope mapping of PSMA against PS3B1352 (top) and PS3B1353 (bottom). G is glycosylation site. Black box is epitope and gray is probable epitope. White box indicates no/little change in deuteration level in the presence of the antibody. The residues without box indicate the HDX behaviors were not monitored, because there is no peptide to cover the residues or the residues are the first two residues of a peptide. The epitopes of PS3B1352 and PS3B1353 are identical. The epitopes are residue 597-598 (CR), because the segment 597-598 were significantly protected upon binding (average differences in deuteration levels >10%). The epitopes include residues 599 (D), 602-603 (VV) and 605 (R), because they are marginally protected upon binding (average differences in deuteration levels 5%-10%) and are likely to show bigger protections if longer time points were monitored. The epitopes can be larger than these four segments, because the segments around these four segments, such as 593-594 (LP), 595 (F), 596 (D), 600 (Y), 601 (A), 604 (L), 606-607 (KY), 607-609 (YAD), and 610-612, (KIY), did not exchange at all in the time window employed and can be protected if longer time points were monitored. FIG. 14 discloses SEQ ID NO: 1510.

[0085] FIG. 15 shows HDX-MS identified epitopes of PSMA overlaid on X-ray crystal structure. Blue: epitope; sky blue: probable epitope; and cyan: potential epitope.

[0086] FIG. 16 shows PAN-T cell binding assay. Human PAN-T cells were treated with various concentrations of PSMA/CD3 bispecific antibodies and incubated at 37° C. for 30 minutes followed by CD3 cell surface expression analysis by flow cytometry.

[0087] FIG. 17 shows the non-linear regression fit of four-parameter function of PSMA ligand binding of C4-2B human prostate tumor cells.

[0088] FIG. 18 shows a target cell binding assay. C4-2B human prostate tumor cells were treated with various concentrations of PSMA/CD3 bispecific antibodies and incubated at 37° C. for 30 minutes followed by PSMA cell surface expression analysis by flow cytometry.

[0089] FIG. 19 shows internalization of PSMA. Human C4-2B prostate tumor cells were incubated with PSMA/CD3 bispecific antibodies conjugated to IncuCyte® Human Fab-fluor-pH Red Antibody Labeling Dye for 24 hours.

[0090] FIGS. 20A-H show bispecific anti-PSMA/anti-T cell redirection antibodies evaluated in an IncuCyte®-based cytotoxicity assay. Isolated PAN-T cells were co-incubated with PSMA+C4-2B cells in the presence of bispecific PSMA/T cell redirection antibodies for 120 hours. Shown are data for (A) PS3B1352, (B) PS3B1356, (C) PS3B1353, (D) PS3B1357, (E) PS3B1354, (F) PS3B937, (G) PS3B1355, and (H) PS3B1358.

[0091] FIG. 21 shows T cell redirected killing assay. Normal human PBMCs were combined with C4-2B human prostate tumor cells transduced with IncuCyte® NucLight red nuclear dye and treated with PSMA/CD3 bispecific antibodies for 5 days.

[0092] FIG. 22 shows cytokine induction by bispecific anti-PSMA/anti-T cell redirection antibodies. Isolated PAN-T cells were co-incubated with PSMA+C4-2B cells in the presence of bispecific anti-PSMA/anti-T cell redirection antibodies for the indicated time points. IFN-gamma concentration was measured from supernatants collected at the indicated time points.

### DETAILED DESCRIPTION OF THE INVENTION

[0093] All publications, including but not limited to patents and patent applications, cited in this specification are herein incorporated by reference as though fully set forth.

[0094] It is to be understood that the terminology used herein is for the purpose of describing particular embodiments only and is not intended to be limiting. Unless defined otherwise, all technical and scientific terms used herein have the same meaning as commonly understood by one of ordinary skill in the art to which the invention pertains.

[0095] Although any methods and materials similar or equivalent to those described herein may be used in the practice for testing of the present invention, exemplary materials and methods are described herein. In describing and claiming the present invention, the following terminology will be used.

[0096] When a list is presented, unless stated otherwise, it is to be understood that each individual element of that list, and every combination of that list, is a separate embodiment. For example, a list of embodiments presented as “A, B, or C” is to be interpreted as including the embodiments, “A,” “B,” “C,” “A or B,” “A or C,” “B or C,” or “A, B, or C.”

[0097] As used in this specification and the appended claims, the singular forms “a,” “an,” and “the” include plural referents unless the content clearly dictates otherwise. Thus, for example, reference to “a cell” includes a combination of two or more cells, and the like.

[0098] The transitional terms “comprising,” “consisting essentially of,” and “consisting of” are intended to connote their generally accepted meanings in the patent vernacular; that is, (i) “comprising,” which is synonymous with “including,” “containing,” or “characterized by,” is inclusive or open-ended and does not exclude additional, unrecited elements or method steps; (ii) “consisting of” excludes any element, step, or ingredient not specified in the claim; and (iii) “consisting essentially of” limits the scope of a claim to the specified materials or steps “and those that do not materially affect the basic and novel characteristic(s)” of the claimed invention. Embodiments described in terms of the phrase “comprising” (or its equivalents) also provide as embodiments those independently described in terms of “consisting of” and “consisting essentially of.”

[0099] “About” means within an acceptable error range for the particular value as determined by one of ordinary skill in the art, which will depend in part on how the value is measured or determined, i.e., the limitations of the measurement system. Unless explicitly stated otherwise within the Examples or elsewhere in the Specification in the context of a particular assay, result or embodiment, “about” means within one standard deviation per the practice in the art, or a range of up to 5%, whichever is larger.

[0100] “Activation” or “stimulation” or “activated” or “stimulated” refers to induction of a change in the biologic state of a cell resulting in expression of activation markers, cytokine production, proliferation or mediating cytotoxicity of target cells. Cells may be activated by primary stimulatory signals. Co-stimulatory signals can amplify the magnitude of the primary signals and suppress cell death following initial stimulation resulting in a more durable activation state and thus a higher cytotoxic capacity. A “co-stimulatory signal” refers to a signal, which in combination with a primary signal, such as TCR/CD3 ligation, leads to T cell and/or NK cell proliferation and/or upregulation or downregulation of key molecules.

[0101] “Alternative scaffold” refers to a single chain protein framework that contains a structured core associated with variable domains of high conformational tolerance. The variable domains tolerate variation to be introduced without compromising scaffold integrity, and hence the variable domains can be engineered and selected for binding to a specific antigen.

[0102] “Antibody-dependent cellular cytotoxicity”, “antibody-dependent cell-mediated cytotoxicity” or “ADCC” refers to the mechanism of inducing cell death that depends upon the interaction of antibody-coated target cells with effector cells possessing lytic activity, such as natural killer cells (NK), monocytes, macrophages and neutrophils via Fc gamma receptors (FcγR) expressed on effector cells.

[0103] “Antibody-dependent cellular phagocytosis” or “ADCP” refers to the mechanism of elimination of antibody-coated target cells by internalization by phagocytic cells, such as macrophages or dendritic cells.

[0104] “Antigen” refers to any molecule (e.g., protein, peptide, polysaccharide, glycoprotein, glycolipid, nucleic acid, portions thereof, or combinations thereof) capable of being bound by an antigen binding domain or a T-cell receptor that is capable of mediating an immune response. Exemplary immune responses include antibody production and activation of immune cells, such as T cells, B cells or NK cells. Antigens may be expressed by genes, synthetized, or purified from biological samples such as a tissue sample, a tumor sample, a cell or a fluid with other biological components, organisms, subunits of proteins/antigens, killed or inactivated whole cells or lysates.

[0105] “Antigen binding fragment” or “antigen binding domain” refers to a portion of the protein that binds an antigen. Antigen binding fragments may be synthetic, enzymatically obtainable or genetically engineered polypeptides and include portions of an immunoglobulin that bind an antigen, such as the VH, the VL, the VH and the VL, Fab, Fab′, F(ab′)₂, Fd and Fv fragments, domain antibodies (dAb) consisting of one VH domain or one VL domain, shark variable IgNAR domains, camelized VH domains, VHH domains, minimal recognition units consisting of the amino acid residues that mimic the CDRs of an antibody, such as FR3-CDR3-FR4 portions, the HCDR1, the HCDR2 and/or the HCDR3 and the LCDR1, the LCDR2 and/or the LCDR3, alternative scaffolds that bind an antigen, and multispecific proteins comprising the antigen binding fragments. Antigen binding fragments (such as VH and VL) may be linked together via a synthetic linker to form various types of single antibody designs where the VH/VL domains may pair intramolecularly, or intermolecularly in those cases when the VH and VL domains are expressed by separate single chains, to form a monovalent antigen binding domain, such as single chain Fv (scFv) or diabody. Antigen binding fragments may also be conjugated to other antibodies, proteins, antigen binding fragments or alternative scaffolds which may be monospecific or multispecific to engineer bispecific and multispecific proteins.

[0106] “Antibodies” is meant in a broad sense and includes immunoglobulin molecules including monoclonal antibodies including murine, human, humanized and chimeric monoclonal antibodies, antigen binding fragments, multispecific antibodies, such as bispecific, trispecific, tetraspecific etc., dimeric, tetrameric or multimeric antibodies, single chain antibodies, domain antibodies and any other modified configuration of the immunoglobulin molecule that comprises an antigen binding site of the required specificity. “Full length antibodies” are comprised of two heavy chains (HC) and two light chains (LC) inter-connected by disulfide bonds as well as multimers thereof (e.g. IgM). Each heavy chain is comprised of a heavy chain variable region (VH) and a heavy chain constant region (comprised of domains CH1, hinge, CH2 and CH3). Each light chain is comprised of a light chain variable region (VL) and a light chain constant region (CL). The VH and the VL regions may be further subdivided into regions of hypervariability, termed complementarity determining regions (CDR), interspersed with framework regions (FR). Each VH and VL is composed of three CDRs and four FR segments, arranged from amino-to-carboxy-terminus in the following order: FR1, CDR1, FR2, CDR2, FR3, CDR3 and FR4. Immunoglobulins may be assigned to five major classes, IgA, IgD, IgE, IgG and IgM, depending on the heavy chain constant domain amino acid sequence. IgA and IgG are further sub-classified as the isotypes IgA1, IgA2, IgG1, IgG2, IgG3 and IgG4. Antibody light chains of any vertebrate species may be assigned to one of two clearly distinct types, namely kappa (κ) and lambda (λ), based on the amino acid sequences of their constant domains.

[0107] “Bispecific” refers to a molecule (such as a protein or an antibody) that specifically binds two distinct antigens or two distinct epitopes within the same antigen. The bispecific molecule may have cross-reactivity to other related antigens, for example to the same antigen from other species (homologs), such as human or monkey, for example Macaca cynomolgus (cynomolgus, cyno) or Pan troglodytes, or may bind an epitope that is shared between two or more distinct antigens.

[0108] “Bispecific anti-PSMA/anti-CD3 antibody”, “PSMA/CD3 antibody”, “PSMAxCD3 antibody,” “anti-PSMA/anti-CD3 protein,” and the like refer to an antibody that binds PSMA and CD3 and that comprises at least one binding domain specifically binding PSMA and at least one binding domain specifically binding CD3. The domains specifically binding PSMA and CD3 are typically VH/VL pairs. The bispecific anti-PSMAxCD3 antibody may be monovalent in terms of its binding to either PSMA or CD3.

[0109] “Bispecific anti-CD79b/anti-CD3 antibody”, “anti-CD79b×CD3”, “CD79b/CD3 antibody”, “CD79b×CD3 antibody,” “anti-CD79b/anti-CD3 protein,” and the like refer to an antibody that binds CD79b and CD3 and that comprises at least one binding domain specifically binding CD79b and at least one binding domain specifically binding CD3. The domains specifically binding CD79b and CD3 are typically V_{H}/V_{L} pairs. The bispecific anti CD79b×CD3 antibody may be monovalent in terms of its binding to either CD79b or CD3.

[0110] “Cancer” refers to a broad group of various diseases characterized by the uncontrolled growth of abnormal cells in the body. Unregulated cell division and growth results in the formation of malignant tumors that invade neighboring tissues and may also metastasize to distant parts of the body through the lymphatic system or bloodstream. A “cancer” or “cancer tissue” can include a tumor.

[0111] “Cluster of Differentiation 3 ε” or “CD3ε” refers to a known protein which is also called “T-cell surface glycoprotein CD3 epsilon chain”, or “T3E”. CD3ε, together with CD3-gamma, -delta and -zeta, and the T-cell receptor alpha/beta and gamma/delta heterodimers, forms the T-cell receptor-CD3 complex. This complex plays an important role in coupling antigen recognition to several intracellular signal-transduction pathways. The CD3 complex mediates signal transduction, resulting in T cell activation and proliferation. CD3 is required for the immune response. The amino acid sequence of a full length CD3ε is shown in SEQ ID NO: 1. The amino acid sequence of the extracellular domain (ECD) of CD3ε is shown in SEQ ID NO: 2. Throughout the specification, “CD3ε-specific” or “specifically binds CD3ε” or “anti-CD3ε antibody” refers to antibodies that bind specifically to the CD3ε polypeptide (SEQ ID NO: 1), including antibodies that bind specifically to the CD3ε extracellular domain (ECD) (SEQ ID NO: 2).

(Human CD3 epsilon)
SEQ ID NO: 1
MQSGTHWRVLGLCLLSVGVWGQDGNEEMGGITQTPYKVSISGTTVILTC
PQYPGSEILWQHNDKNIGGDEDDKNIGSDEDHLSLKEFSELEQSGYYVC
YPRGSKPEDANFYLYLRARVCENCMEMDVMSVATIVIVDICITGGLLLL
VYYWSKNRKAKAKPVTRGAGAGGRQRGQNKERPPPVPNPDYEPIRKGQR
DLYSGLNQRRI
(Human CD3 epsilon extracellular domain)
SEQ ID NO: 2
DGNEEMGGITQTPYKVSISGTTVILTCPQYPGSEILWQHNDKNIGGDED
DKNIGSDEDHLSLKEFSELEQSGYYVCYPRGSKPEDANFYLYLRARVCE
NCMEMD

[0112] “Cluster of Differentiation CD79B protein” or “CD79b” refers to a B-cell antigen receptor (BCR) signaling component Igβ. The amino acid sequences of the various isoforms are retrievable from GenBank accession numbers AAH32651.1, EAW94232.1, AAH02975.2, NP_000617.1, and NP_001035022.1. The amino acid sequence of the full length CD79b sequence is shown below (SEQ ID NO: 241). The sequence includes the extracellular domain (residues 29-159) and the cytoplasmic domain (residues 181-229).

(SEQ ID NO: 241)
MARLALSPVPSHWMVALLLLLSAEPVPAARSEDRYRNPKGSACSRIWQS
PRFIARKRGFTVKMHCYMNSASGNVSWLWKQEMDENPQQLKLEKGRMEE
SQNESLATLTIQGIRFEDNGIYFCQQKCNNTSEVYQGCGTELRVMGFST
LAQLKQRNTLKDGIIMIQTLLIILFIIVPIFLLLDKDDSKAGMEEDHTY
EGLDIDQTATYEDIVTLRTGEVKWSVGEHPGQE.

[0113] “Complement-dependent cytotoxicity” or “CDC”, refers to the mechanism of inducing cell death in which the Fc effector domain of a target-bound protein binds and activates complement component C1q which in turn activates the complement cascade leading to target cell death. Activation of complement may also result in deposition of complement components on the target cell surface that facilitate CDC by binding complement receptors (e.g., CR3) on leukocytes.

[0114] “Complementarity determining regions” (CDR) are antibody regions that bind an antigen. There are three CDRs in the VH (HCDR1, HCDR2, HCDR3) and three CDRs in the VL (LCDR1, LCDR2, LCDR3). CDRs may be defined using various delineations such as Kabat (Wu et al. (1970) J Exp Med 132: 211-50; Kabat et al., Sequences of Proteins of Immunological Interest, 5th Ed. Public Health Service, National Institutes of Health, Bethesda, Md., 1991), Chothia (Chothia et al. (1987) J Mol Biol 196: 901-17), IMGT (Lefranc et al. (2003) Dev Comp Immunol 27: 55-77) and AbM (Martin and Thornton J Bmol Biol 263: 800-15, 1996). The correspondence between the various delineations and variable region numbering is described (see e.g. Lefranc et al. (2003) Dev Comp Immunol 27: 55-77; Honegger and Pluckthun, J Mol Biol (2001) 309:657-70; International ImMunoGeneTics (IMGT) database; Web resources (for example, can be retrieved from the Internet <URL: http://www.imgt.org>)). Available programs such as abYsis by UCL Business PLC may be used to delineate CDRs. The term “CDR”, “HCDR1”, “HCDR2”, “HCDR3”, “LCDR1”, “LCDR2” and “LCDR3” as used herein includes CDRs defined by any of the methods described supra, Kabat, Chothia, IMGT or AbM, unless otherwise explicitly stated in the specification.

[0115] “Decrease,” “lower,” “lessen,” “reduce,” or “abate” refers generally to the ability of a test molecule to mediate a reduced response (i.e., downstream effect) when compared to the response mediated by a control or a vehicle. Exemplary responses are T cell expansion, T cell activation or T-cell mediated tumor cell killing or binding of a protein to its antigen or receptor, enhanced binding to a Fcγ or enhanced Fc effector functions such as enhanced ADCC, CDC and/or ADCP. Decrease may be a statistically significant difference in the measured response between the test molecule and the control (or the vehicle), or a decrease in the measured response, such as a decrease of about 1.1, 1.2, 1.5, 2, 3, 4, 5, 6, 7, 8, 9, 10, 15, 20 or 30 fold or more, such as 500, 600, 700, 800, 900 or 1000 fold or more (including all integers and decimal points in between and above 1, e.g., 1.5, 1.6, 1.7. 1.8, etc.).

[0116] “Differentiation” refers to a method of decreasing the potency or proliferation of a cell or moving the cell to a more developmentally restricted state.

[0117] “Encode” or “encoding” refers to the inherent property of specific sequences of nucleotides in a polynucleotide, such as a gene, a cDNA, or an mRNA, to serve as templates for synthesis of other polymers and macromolecules in biological processes having either a defined sequence of nucleotides (e.g., rRNA, tRNA and mRNA) or a defined sequence of amino acids and the biological properties resulting therefrom. Thus, a gene, cDNA, or RNA, encodes a protein if transcription and translation of mRNA corresponding to that gene produces the protein in a cell or other biological system. Both the coding strand, the nucleotide sequence of which is identical to the mRNA sequence, and the non-coding strand, used as the template for transcription of a gene or cDNA, can be referred to as encoding the protein or other product of that gene or cDNA.

[0118] “Enhance,” “promote,” “increase,” “expand” or “improve” refers generally to the ability of a test molecule to mediate a greater response (i.e., downstream effect) when compared to the response mediated by a control or a vehicle. Exemplary responses are T cell expansion, T cell activation or T-cell mediated tumor cell killing or binding of a protein to its antigen or receptor, enhanced binding to a Fcγ or enhanced Fc effector functions such as enhanced ADCC, CDC and/or ADCP Enhance may be a statistically significant difference in the measured response between the test molecule and control (or vehicle), or an increase in the measured response, such as an increase of about 1.1, 1.2, 1.5, 2, 3, 4, 5, 6, 7, 8, 9, 10, 15, 20 or 30 fold or more, such as 500, 600, 700, 800, 900 or 1000 fold or more (including all integers and decimal points in between and above 1, e.g., 1.5, 1.6, 1.7. 1.8, etc.).

[0119] “Epitope” refers to a portion of an antigen to which an antibody, or the antigen binding portion thereof, specifically binds. Epitopes typically consist of chemically active (such as polar, non-polar or hydrophobic) surface groupings of moieties such as amino acids or polysaccharide side chains and may have specific three-dimensional structural characteristics, as well as specific charge characteristics. An epitope may be composed of contiguous and/or discontiguous amino acids that form a conformational spatial unit. For a discontiguous epitope, amino acids from differing portions of the linear sequence of the antigen come in close proximity in 3-dimensional space through the folding of the protein molecule. Antibody “epitope” depends on the methodology used to identify the epitope.

[0120] “Expansion” refers to the outcome of cell division and cell death.

[0121] “Express” and “expression” refers the to the well-known transcription and translation occurring in cells or in vitro. The expression product, e.g., the protein, is thus expressed by the cell or in vitro and may be an intracellular, extracellular or a transmembrane protein.

[0122] “Expression vector” refers to a vector that can be utilized in a biological system or in a reconstituted biological system to direct the translation of a polypeptide encoded by a polynucleotide sequence present in the expression vector.

[0123] “dAb” or “dAb fragment” refers to an antibody fragment composed of a VH domain (Ward et al., Nature 341:544 546 (1989)).

[0124] “Fab” or “Fab fragment” refers to an antibody fragment composed of VH, CH1, VL and CL domains.

[0125] “F(ab′)₂” or “F(ab′)₂ fragment” refers to an antibody fragment containing two Fab fragments connected by a disulfide bridge in the hinge region.

[0126] “Fd” or “Fd fragment” refers to an antibody fragment composed of VH and CH1 domains.

[0127] “Fv” or “Fv fragment” refers to an antibody fragment composed of the VH and the VL domains from a single arm of the antibody.

[0128] “Full length antibody” is comprised of two heavy chains (HC) and two light chains (LC) inter-connected by disulfide bonds as well as multimers thereof (e.g. IgM). Each heavy chain is comprised of a heavy chain variable domain (VH) and a heavy chain constant domain, the heavy chain constant domain comprised of subdomains CH1, hinge, CH2 and CH3. Each light chain is comprised of a light chain variable domain (VL) and a light chain constant domain (CL). The VH and the VL may be further subdivided into regions of hypervariability, termed complementarity determining regions (CDR), interspersed with framework regions (FR). Each VH and VL is composed of three CDRs and four FR segments, arranged from amino-to-carboxy-terminus in the following order: FR1, CDR1, FR2, CDR2, FR3, CDR3 and FR4.

[0129] “Genetic modification” refers to the introduction of a “foreign” (i.e., extrinsic or extracellular) gene, DNA or RNA sequence to a host cell, so that the host cell will express the introduced gene or sequence to produce a desired substance, typically a protein or enzyme coded by the introduced gene or sequence. The introduced gene or sequence may also be called a “cloned” or “foreign” gene or sequence, may include regulatory or control sequences operably linked to polynucleotide encoding the chimeric antigen receptor, such as start, stop, promoter, signal, secretion, or other sequences used by a cell's genetic machinery. The gene or sequence may include nonfunctional sequences or sequences with no known function. A host cell that receives and expresses introduced DNA or RNA has been “genetically engineered.” The DNA or RNA introduced to a host cell can come from any source, including cells of the same genus or species as the host cell, or from a different genus or species.

[0130] “Heterologous” refers to two or more polynucleotides or two or more polypeptides that are not found in the same relationship to each other in nature.

[0131] “Heterologous polynucleotide” refers to a non-naturally occurring polynucleotide that encodes two or more neoantigens as described herein.

[0132] “Heterologous polypeptide” refers to a non-naturally occurring polypeptide comprising two or more neoantigen polypeptides as described herein.

[0133] “Host cell” refers to any cell that contains a heterologous nucleic acid. An exemplary heterologous nucleic acid is a vector (e.g., an expression vector).

[0134] “Human antibody” refers to an antibody that is optimized to have minimal immune response when administered to a human subject. Variable regions of human antibody are derived from human immunoglobulin sequences. If human antibody contains a constant region or a portion of the constant region, the constant region is also derived from human immunoglobulin sequences. Human antibody comprises heavy and light chain variable regions that are “derived from” sequences of human origin if the variable regions of the human antibody are obtained from a system that uses human germline immunoglobulin or rearranged immunoglobulin genes. Such exemplary systems are human immunoglobulin gene libraries displayed on phage, and transgenic non-human animals such as mice or rats carrying human immunoglobulin loci. “Human antibody” typically contains amino acid differences when compared to the immunoglobulins expressed in humans due to differences between the systems used to obtain the human antibody and human immunoglobulin loci, introduction of somatic mutations or intentional introduction of substitutions into the frameworks or CDRs, or both. Typically, “human antibody” is at least about 80%, 81%, 82%, 83%, 84%, 85%, 86%, 87%, 88%, 89%, 90%, 91%, 92%, 93%, 94%, 95%, 96%, 97%, 98% or 99% identical in amino acid sequence to an amino acid sequence encoded by human germline immunoglobulin or rearranged immunoglobulin genes. In some cases, “human antibody” may contain consensus framework sequences derived from human framework sequence analyses, for example as described in Knappik et al., (2000) J Mol Biol 296:57-86, or a synthetic HCDR3 incorporated into human immunoglobulin gene libraries displayed on phage, for example as described in Shi et al., (2010) J Mol Biol 397:385-96, and in Int. Patent Publ. No. WO2009/085462. Antibodies in which at least one CDR is derived from a non-human species are not included in the definition of “human antibody”.

[0135] “Humanized antibody” refers to an antibody in which at least one CDR is derived from non-human species and at least one framework is derived from human immunoglobulin sequences. Humanized antibody may include substitutions in the frameworks so that the frameworks may not be exact copies of expressed human immunoglobulin or human immunoglobulin germline gene sequences.

[0136] “In combination with” means that two or more therapeutic agents are be administered to a subject together in a mixture, concurrently as single agents or sequentially as single agents in any order.

[0137] “Intracellular signaling domain” or “cytoplasmic signaling domain” refers to an intracellular portion of a molecule. It is the functional portion of the protein which acts by transmitting information within the cell to regulate cellular activity via defined signaling pathways by generating second messengers or functioning as effectors by responding to such messengers. The intracellular signaling domain generates a signal that promotes an immune effector function of the CAR containing cell, e.g., a CAR-T cell.

[0138] “Isolated” refers to a homogenous population of molecules (such as synthetic polynucleotides or polypeptides) which have been substantially separated and/or purified away from other components of the system the molecules are produced in, such as a recombinant cell, as well as a protein that has been subjected to at least one purification or isolation step. “Isolated” refers to a molecule that is substantially free of other cellular material and/or chemicals and encompasses molecules that are isolated to a higher purity, such as to 80%, 81%, 82%, 83%, 84%, 85%, 86%, 87%, 88%, 89%, 90%, 91%, 92%, 93%, 94%, 95%, 96%, 97%, 98%, 99% or 100% purity.

[0139] “Modulate” refers to either enhanced or decreased ability of a test molecule to mediate an enhanced or a reduced response_(i.e., downstream effect) when compared to the response mediated by a control or a vehicle.

[0140] “Monoclonal antibody” refers to an antibody obtained from a substantially homogenous population of antibody molecules, i.e., the individual antibodies comprising the population are identical except for possible well-known alterations such as removal of C-terminal lysine from the antibody heavy chain or post-translational modifications such as amino acid isomerization or deamidation, methionine oxidation or asparagine or glutamine deamidation. Monoclonal antibodies typically bind one antigenic epitope. A bispecific monoclonal antibody binds two distinct antigenic epitopes. Monoclonal antibodies may have heterogeneous glycosylation within the antibody population. Monoclonal antibody may be monospecific or multispecific such as bispecific, monovalent, bivalent or multivalent.

[0141] “Multispecific” refers to a molecule, such as an antibody that specifically binds two or more distinct antigens or two or more distinct epitopes within the same antigen. Multispecific molecule may have cross-reactivity to other related antigens, for example to the same antigen from other species (homologs), such as human or monkey, for example Macaca fascicularis (cynomolgus, cyno) or Pan troglodytes, or may bind an epitope that is shared between two or more distinct antigens.

[0142] “Natural killer cell” and “NK cell” are used interchangeably and synonymously herein. NK cell refers to a differentiated lymphocyte with a CD16⁺CD56⁺ and/or CD57⁺ TCR: phenotype. NK cells are characterized by their ability to bind to and kill cells that fail to express “self” MHC/HLA antigens by the activation of specific cytolytic enzymes, the ability to kill tumor cells or other diseased cells that express a ligand for NK activating receptors, and the ability to release protein molecules called cytokines that stimulate or inhibit the immune response.

[0143] “Operatively linked” and similar phrases, when used in reference to nucleic acids or amino acids, refers to the operational linkage of nucleic acid sequences or amino acid sequence, respectively, placed in functional relationships with each other. For example, an operatively linked promoter, enhancer elements, open reading frame, 5′ and 3′ UTR, and terminator sequences result in the accurate production of a nucleic acid molecule (e.g., RNA) and in some instances to the production of a polypeptide (i.e., expression of the open reading frame). Operatively linked peptide refers to a peptide in which the functional domains of the peptide are placed with appropriate distance from each other to impart the intended function of each domain.

[0144] The term “paratope” refers to the area or region of an antibody molecule which is involved in binding of an antigen and comprise residues that interact with an antigen. A paratope may composed of continuous and/or discontinuous amino acids that form a conformational spatial unit. The paratope for a given antibody can be defined and characterized at different levels of details using a variety of experimental and computational methods. The experimental methods include hydrogen/deuterium exchange mass spectrometry (HX-MS). The paratope will be defined differently depending on the mapping method employed.

[0145] “Pharmaceutical combination” refers to a combination of two or more active ingredients administered either together or separately.

[0146] “Pharmaceutical composition” refers to a composition that results from combining an active ingredient and a pharmaceutically acceptable carrier.

[0147] “Pharmaceutically acceptable carrier” or “excipient” refers to an ingredient in a pharmaceutical composition, other than the active ingredient, which is nontoxic to a subject. Exemplary pharmaceutically acceptable carriers are a buffer, stabilizer or preservative.

[0148] “Polynucleotide” or “nucleic acid” refers to a synthetic molecule comprising a chain of nucleotides covalently linked by a sugar-phosphate backbone or other equivalent covalent chemistry. cDNA is a typical example of a polynucleotide. Polynucleotide may be a DNA or a RNA molecule.

[0149] “Prevent,” “preventing,” “prevention,” or “prophylaxis” of a disease or disorder means preventing that a disorder occurs in a subject.

[0150] “Proliferation” refers to an increase in cell division, either symmetric or asymmetric division of cells.

[0151] “Promoter” refers to the minimal sequences required to initiate transcription. Promoter may also include enhancers or repressor elements which enhance or suppress transcription, respectively.

[0152] “Protein” or “polypeptide” are used interchangeably herein and refer to a molecule that comprises one or more polypeptides each comprised of at least two amino acid residues linked by a peptide bond. Protein may be a monomer, or may be protein complex of two or more subunits, the subunits being identical or distinct. Small polypeptides of less than 50 amino acids may be referred to as “peptides”. Protein may be a heterologous fusion protein, a glycoprotein, or a protein modified by post-translational modifications such as phosphorylation, acetylation, myristoylation, palmitoylation, glycosylation, oxidation, formylation, amidation, citrullination, polyglutamylation, ADP-ribosylation, pegylation or biotinylation. Protein may be an antibody or may comprise an antigen binding fragment of an antibody. Protein may be recombinantly expressed.

[0153] “Prostate-specific membrane antigen” or “PSMA” refers to a type II membrane protein expressed on certain cells. The amino acid sequence of the human PSMA is shown in SEQ ID NO: 240. The extracellular domain spans residues 44-750, the transmembrane domain spans residues 20-43 and the cytoplasmic domain spans residues 1-19 of SEQ ID NO: 240.

SEQ ID NO: 240
MWNLLHETDSAVATARRPRWLCAGALVLAGGFFLLGFLFGWFIKSSNEA
TNITPKHNMKAFLDELKAENIKKFLYNFTQIPHLAGTEQNFQLAKQIQS
QWKEFGLDSVELAHYDVLLSYPNKTHPNYISIINEDGNEIFNTSLFEPP
PPGYENVSDIVPPFSAFSPQGMPEGDLVYVNYARTEDFFKLERDMKINC
SGKIVIARYGKVFRGNKVKNAQLAGAKGVILYSDPADYFAPGVKSYPDG
WNLPGGGVQRGNILNLNGAGDPLTPGYPANEYAYRRGIAEAVGLPSIPV
HPIGYYDAQKLLEKMGGSAPPDSSWRGSLKVPYNVGPGFTGNFSTQKVK
MHIHSTNEVTRIYNVIGTLRGAVEPDRYVILGGHRDSWVFGGIDPQSGA
AVVHEIVRSFGTLKKEGWRPRRTILFASWDAEEFGLLGSTEWAEENSRL
LQERGVAYINADSSIEGNYTLRVDCTPLMYSLVHNLTKELKSPDEGFEG
KSLYESWTKKSPSPEFSGMPRISKLGSGNDFEVFFQRLGIASGRARYTK
NWETNKFSGYPLYHSVYETYELVEKFYDPMFKYHLTVAQVRGGMVFELA
NSIVLPFDCRDYAVVLRKYADKIYSISMKHPQEMKTYSVSFDSLFSAVK
NFTEIASKFSERLQDFDKSNPIVLRMMNDQLMFLERAFIDPLGLPDRPF
YRHVIYAPSSHNKYAGESFPGIYDALFDIESKVDPSKAWGEVKRQIYVA
AFTVQAAAETLSEVA

[0154] “Recombinant” refers to polynucleotides, polypeptides, vectors, viruses and other macromolecules that are prepared, expressed, created or isolated by recombinant means.

[0155] “Regulatory element” refers to any cis- or trans acting genetic element that controls some aspect of the expression of nucleic acid sequences.

[0156] “Relapsed” refers to the return of a disease or the signs and symptoms of a disease after a period of improvement after prior treatment with a therapeutic.

[0157] “Refractory” refers to a disease that does not respond to a treatment. A refractory disease can be resistant to a treatment before or at the beginning of the treatment, or a refractory disease can become resistant during a treatment.

[0158] “Single chain Fv” or “scFv” refers to a fusion protein comprising at least one antibody fragment comprising a light chain variable region (VL) and at least one antibody fragment comprising a heavy chain variable region (VH), wherein the VL and the VH are contiguously linked via a polypeptide linker, and capable of being expressed as a single chain polypeptide. Unless specified, as used herein, a scFv may have the VL and VH variable regions in either order, e.g., with respect to the N-terminal and C-terminal ends of the polypeptide, the scFv may comprise VL-linker-VH or may comprise VH-linker-VL.

[0159] “(scFv)₂” or “tandem scFv” or “bis-scFv” fragments refers to a fusion protein comprising two light chain variable region (VL) and two heavy chain variable region (VH), wherein the two VL and the two VH are contiguously linked via polypeptide linkers, and capable of being expressed as a single chain polypeptide. The two VL and two VH are fused by peptide linkers to form a bivalent molecule VL_{A}-linker-VH_{A}-linker-VL_{B}-linker-VH_{B} to form two binding sites, capable of binding two different antigens or epitopes concurrently.

[0160] “Specifically binds,” “specific binding,” “specifically binding” or “binds” refer to a proteinaceous molecule binding to an antigen or an epitope within the antigen with greater affinity than for other antigens. Typically, the proteinaceous molecule binds to the antigen or the epitope within the antigen with an equilibrium dissociation constant (K_{D}) of about 1×10⁻⁷ M or less, for example about 5×10⁻⁸ M or less, about 1×10⁻⁸ M or less, about 1×10⁻⁹ M or less, about 1×10⁻¹⁰ M or less, about 1×10⁻¹¹ M or less, or about 1×10⁻¹² M or less, typically with the K_{D} that is at least one hundred fold less than its K_{D} for binding to a non-specific antigen (e.g., BSA, casein). In the context of the prostate neoantigens described here, “specific binding” refers to binding of the proteinaceous molecule to the prostate neoantigen without detectable binding to a wild-type protein the neoantigen is a variant of.

[0161] “Subject” includes any human or nonhuman animal. “Nonhuman animal” includes all vertebrates, e.g., mammals and non-mammals, such as nonhuman primates, sheep, dogs, cats, horses, cows, chickens, amphibians, reptiles, etc. The terms “subject” and “patient” can be used interchangeably herein.

[0162] “T cell” and “T lymphocyte” are interchangeable and used synonymously herein. T cell includes thymocytes, naïve T lymphocytes, memory T cells, immature T lymphocytes, mature T lymphocytes, resting T lymphocytes, or activated T lymphocytes. A T cell can be a T helper (Th) cell, for example a T helper 1 (Th1) or a T helper 2 (Th2) cell. The T cell can be a helper T cell (HTL; CD4⁺ T cell) CD4⁺ T cell, a cytotoxic T cell (CTL; CD8⁺ T cell), a tumor infiltrating cytotoxic T cell (TIL; CD8⁺ T cell), CD4⁺CD8⁺ T cell, or any other subset of T cells. Also included are “NKT cells”, which refer to a specialized population of T cells that express a semi-invariant αβ T-cell receptor, but also express a variety of molecular markers that are typically associated with NK cells, such as NK1.1. NKT cells include NK1.1⁺ and NK1.1⁻, as well as CD4⁺, CD4⁻, CD8⁺ and CD8⁻ cells. The TCR on NKT cells is unique in that it recognizes glycolipid antigens presented by the MHC I-like molecule CD Id. NKT cells can have either protective or deleterious effects due to their abilities to produce cytokines that promote either inflammation or immune tolerance. Also included are “gamma-delta T cells (γδ T cells),” which refer to a specialized population that to a small subset of T cells possessing a distinct TCR on their surface, and unlike the majority of T cells in which the TCR is composed of two glycoprotein chains designated α- and β-TCR chains, the TCR in γδ T cells is made up of a γ-chain and a δ-chain. γδ T cells can play a role in immunosurveillance and immunoregulation, and were found to be an important source of IL-17 and to induce robust CD8⁺ cytotoxic T cell response. Also included are “regulatory T cells” or “Tregs” which refer to T cells that suppress an abnormal or excessive immune response and play a role in immune tolerance. Tregs are typically transcription factor Foxp3-positive CD4⁺ T cells and can also include transcription factor Foxp3-negative regulatory T cells that are IL-10-producing CD4⁺ T cells.

[0163] “Therapeutically effective amount” or “effective amount” used interchangeably herein, refers to an amount effective, at dosages and for periods of time necessary, to achieve a desired therapeutic result. A therapeutically effective amount may vary according to factors such as the disease state, age, sex, and weight of the individual, and the ability of a therapeutic or a combination of therapeutics to elicit a desired response in the individual. Example indicators of an effective therapeutic or combination of therapeutics that include, for example, improved wellbeing of the patient, reduction of a tumor burden, arrested or slowed growth of a tumor, and/or absence of metastasis of cancer cells to other locations in the body.

[0164] “Transduction” refers to the introduction of a foreign nucleic acid into a cell using a viral vector.

[0165] “Treat,” “treating” or “treatment” of a disease or disorder such as cancer refers to accomplishing one or more of the following: reducing the severity and/or duration of the disorder, inhibiting worsening of symptoms characteristic of the disorder being treated, limiting or preventing recurrence of the disorder in subjects that have previously had the disorder, or limiting or preventing recurrence of symptoms in subjects that were previously symptomatic for the disorder.

[0166] “Tumor cell” or a “cancer cell” refers to a cancerous, pre-cancerous or transformed cell, either in vivo, ex vivo, or in tissue culture, that has spontaneous or induced phenotypic changes. These changes do not necessarily involve the uptake of new genetic material. Although transformation may arise from infection with a transforming virus and incorporation of new genomic nucleic acid, uptake of exogenous nucleic acid or it can also arise spontaneously or following exposure to a carcinogen, thereby mutating an endogenous gene. Transformation/cancer is exemplified by morphological changes, immortalization of cells, aberrant growth control, foci formation, proliferation, malignancy, modulation of tumor specific marker levels, invasiveness, tumor growth in suitable animal hosts such as nude mice, and the like, in vitro, in vivo, and ex vivo.

[0167] “Variant,” “mutant” or “altered” refers to a polypeptide or a polynucleotide that differs from a reference polypeptide or a reference polynucleotide by one or more modifications, for example one or more substitutions, insertions or deletions.

[0168] The numbering of amino acid residues in the antibody constant region throughout the specification is according to the EU index as described in Kabat et al., Sequences of Proteins of Immunological Interest, 5th Ed. Public Health Service, National Institutes of Health, Bethesda, Md. (1991), unless otherwise explicitly stated.

[0169] Mutations in the Ig constant regions are referred to as follows: L351Y_F405A_Y407V refers to L351Y, F405A and Y407V mutations in one immunoglobulin constant region. L351Y_F405A_Y407V/T394W refers to L351Y, F405A and Y407V mutations in the first Ig constant region and T394W mutation in the second Ig constant region, which are present in one multimeric protein.

[0170] “VHH” refers to a single-domain antibody or nanobody, exclusively composed by heavy chain homodimers A VHH single domain antibody lack the light chain and the CH1 domain of the heavy chain of conventional Fab region.

[0171] Unless otherwise stated, any numerical values, such as a concentration or a concentration range described herein, are to be understood as being modified in all instances by the term “about.” Thus, a numerical value typically includes ±10% of the recited value. For example, a concentration of 1 mg/mL includes 0.9 mg/mL to 1.1 mg/mL. Likewise, a concentration range of 1% to 10% (w/v) includes 0.9% (w/v) to 11% (w/v). As used herein, the use of a numerical range expressly includes all possible subranges, all individual numerical values within that range, including integers within such ranges and fractions of the values unless the context clearly indicates otherwise.

[0172] The numbering of amino acid residues in the antibody constant region throughout the specification is according to the EU index as described in Kabat et al., Sequences of Proteins of Immunological Interest, 5th Ed. Public Health Service, National Institutes of Health, Bethesda, Md. (1991), unless otherwise explicitly stated.

TABLE 1
Conventional one- and three-letter amino acid
codes used herein

| Amino acid | Three-letter code | One-letter code |
|---|---|---|
| Alanine | Ala | A |
| Arginine | Arg | R |
| Asparagine | Asn | N |
| Aspartate | Asp | D |
| Cysteine | Cys | C |
| Glutamate | Glu | E |
| Glutamine | Gln | Q |
| Glycine | Gly | G |
| Histidine | His | H |
| Isoleucine | Ile | I |
| Lysine | Lys | K |
| Methionine | Met | M |
| Phenylalanine | Phe | F |
| Proline | Pro | P |
| Serine | Ser | S |
| Threonine | Thr | T |
| Tryptophan | Trp | W |
| Tyrosine | Tyr | Y |
| Valine | Val | V |

[0173] Antigen Binding Domains that Bind CD3ε.

[0174] The disclosure provides antigen binding domains that bind CD3ε, monospecific and multispecific proteins comprising the antigen binding domains that bind CD3ε, polynucleotides encoding the foregoing, vectors, host cells and methods of making and using the foregoing. The antigen binding domains that bind CD3ε identified herein demonstrated several advantageous properties. First, the selection of IGHV1-69*02-IGHJ1-01 and IGKV3-11*02-IGKJ4-01 germlines for CDR grafting ensured enhanced binding as compared to the murine Cris-7 parent antibody. Second, upon introducing human-to-mouse mutations, the selected clones demonstrated improved thermostability by retaining binding after heat shock, including at 55° C., 60° C., and/or 65° C., a characteristic leading to improved manufacturability and storage. This was not the case for the murine Cris-7 parent antibody, which demonstrated minimal binding at all to recombinant CD3 and T cells after heat shock when compared to antigen binding domains that bind CD3ε of the present invention. Third, the Post Translational Modification (PTM) risk was mitigated by substituting at position N106 in SEQ ID Nos: 55, 54, and 48, and thus preventing Asn deamidation, which, if left unmodified, could lead to loss of activity. The engineered position at residue N106 was within HCDR3. Even with mutations at this position within HCR3, antibodies still retained the ability to robustly bind antigen while also possessing added beneficial properties (e.g., improved thermostability).

[0175] The disclosure also provides an isolated protein comprising an antigen binding domain that binds CD3ε, wherein the antigen binding domain that binds CD3ε comprises the HCDR1, the HCDR2, the HCDR3, the LCDR1, the LCDR2 and the LCDR3 of SEQ ID NOs: 70, 71, 86, 79, 80, and 81, respectively. SEQ ID NO: 86 (PQVHYDYXGFPY, wherein X can be Q, A, G, or S) represents a genus HCDR3 amino acid sequence encompassing variants demonstrating improved properties, including improved thermostability, reduced deamidation risk and varied affinity to CD3, depending on the amino acid in place of “X”. For example, if X in SEQ ID NO: 86 is substituted with either Q or A, the CD3 affinity is similar to the parental (having N in place of X); and if X is substituted with either G or S, the CD3 affinity is lower compared to Q or A. This provided the advantageous ability to tune the activity of T cell redirection ability of the multi- or bi-specific proteins comprising the CD3ε biding domains of the disclosure, in order to potentially mitigate cytokine response in subjects and potentially enhance tumor distribution of the multi- or bi-specific proteins.

[0176] The disclosure provides an isolated protein comprising an antigen binding domain that binds CD3ε, wherein the antigen binding domain that binds CD3ε comprises:
[0177] a HCDR1, a HCDR2 and a HCDR3 of a heavy chain variable region (VH) of SEQ ID NO: 55 and a light chain complementarity determining region (LCDR) 1, a LCDR2 and a LCDR3 of a light chain variable region (VL) of SEQ ID NO: 59;
[0178] the HCDR1, the HCDR2 and the HCDR3 of the VH of SEQ ID NO: 55 and the LCDR1, the LCDR2 and the LCDR3 of the VL of SEQ ID NO: 58;
[0179] the HCDR1, the HCDR2 and the HCDR3 of the VH of SEQ ID NO: 54 and the LCDR1, the LCDR2 and the LCDR3 of the VL of SEQ ID NO: 56; or
[0180] the HCDR1, the HCDR2 and the HCDR3 of the VH of SEQ ID NO: 48 and the LCDR1, the LCDR2 and the LCDR3 of the VL of SEQ ID NO: 58;
   [0181] wherein the amino acid in position N106 of SEQ ID NO: 55, 54, or 48 is optionally substituted with the amino acid selected from the group consisting of A, G, S, F, E, T, R, V, I, Y, L, P, Q, and K, wherein the residue numbering starts from N-terminus of SEQ ID NO: 55, 54, or 48.

[0182] The disclosure provides an isolated protein comprising an antigen binding domain that binds CD3ε, wherein the antigen binding domain that binds CD3ε comprises the HCDR1, the HCDR1, the HCDR3, the LCDR1, the LCDR2 and the LCDR3 of SEQ ID NOs: 70, 71, 86, 79, 80, and 81, respectively.

[0183] The disclosure provides an isolated protein comprising an antigen binding domain that binds CD3ε, wherein the antigen binding domain that binds CD3ε comprises the HCDR1, the HCDR1, the HCDR3, the LCDR1, the LCDR2 and the LCDR3 of

[0184] SEQ ID NOs: 70, 71, 72, 79, 80, and 81, respectively;

[0185] SEQ ID NOs: 70, 71, 87, 79, 80, and 81, respectively; or

[0186] SEQ ID NOs: 70, 71, 90, 79, 80, and 81, respectively.

[0187] The disclosure provides an isolated protein comprising an antigen binding domain that binds CD3ε, wherein the antigen binding domain that binds CD3ε comprises the VH of SEQ ID NOs: 55, 54, or 48 and the VL of SEQ ID NOs: 59, 58, or 56.

[0188] The disclosure provides an isolated protein comprising an antigen binding domain that binds CD3ε, wherein the antigen binding domain that binds CD3ε comprises
[0189] the VH of SEQ ID NO: 55 and the VL of SEQ ID NO: 59;
[0190] the VH of SEQ ID NO: 55 and the VL of SEQ ID NO: 58;
[0191] the VH of SEQ ID NO: 54 and the VL of SEQ ID NO: 56; or
[0192] the VH of SEQ ID NO: 58 and the VL of SEQ ID NO: 58.

[0193] In other embodiments, the antigen binding domain that binds CD3ε is a scFv.

[0194] In other embodiments, the antigen binding domain that binds CD3ε is a (scFv)₂.

[0195] In other embodiments, the antigen binding domain that binds CD3ε is a Fv.

[0196] In other embodiments, the antigen binding domain that binds CD3ε is a Fab.

[0197] In other embodiments, the antigen binding domain that binds CD3ε is a F(ab′)2.

[0198] In other embodiments, the antigen binding domain that binds CD3ε is a Fd.

[0199] In other embodiments, the CD3ε antigen binding domain is a dAb.

[0200] In other embodiments, the CD3ε antigen binding domain is a VHH.

[0201] CD3ε Binding scFvs

[0202] Any of the VH and the VL domains identified herein that bind CD3ε may be engineered into scFv format in either VH-linker-VL or VL-linker-VH orientation. Any of the VH and the VL domains identified herein may also be used to generate sc(Fv)₂ structures, such as VH-linker-VL-linker-VL-linker-VH, VH-linker-VL-linker-VH-linker-VL. VH-linker-VH-linker-VL-linker-VL. VL-linker-VH-linker-VH-linker-VL. VL-linker-VH-linker-VL-linker-VH or VL-linker-VL-linker-VH-linker-VH.

[0203] The VH and the VL domains identified herein may be incorporated into a scFv format and the binding and thermostability of the resulting scFv to CD3ε may be assessed using known methods. Binding may be assessed using ProteOn XPR36, Biacore 3000 or KinExA instrumentation, ELISA or competitive binding assays known to those skilled in the art. Binding may be evaluated using purified scFvs or E. coli supernatants or lysed cells containing the expressed scFv. The measured affinity of a test scFv to CD3ε may vary if measured under different conditions (e.g., osmolarity, pH). Thus, measurements of affinity and other binding parameters (e.g., KD, Kon, Koff) are typically made with standardized conditions and standardized buffers. Thermostability may be evaluated by heating the test scFv at elevated temperatures, such as at 50° C., 55° C. or 60° C. for a period of time, such as 5 minutes (min), 10 min, 15 min, 20 min, 25 min or 30 min and measuring binding of the test scFv to CD3ε. The scFvs retaining comparable binding to CD3ε when compared to a non-heated scFv sample are referred to as being thermostable.

[0204] In recombinant expression systems, the linker is a peptide linker and may include any naturally occurring amino acid. Exemplary amino acids that may be included into the linker are Gly, Ser Pro, Thr, Glu, Lys, Arg, Ile, Leu, His and The. The linker should have a length that is adequate to link the VH and the VL in such a way that they form the correct conformation relative to one another so that they retain the desired activity, such as binding to CD3ε.

[0205] The linker may be about 5-50 amino acids long. In other embodiments, the linker is about 10-40 amino acids long. In other embodiments, the linker is about 10-35 amino acids long. In other embodiments, the linker is about 10-30 amino acids long. In other embodiments, the linker is about 10-25 amino acids long. In other embodiments, the linker is about 10-20 amino acids long. In other embodiments, the linker is about 15-20 amino acids long. In other embodiments, the linker is about 16-19 amino acids long. In other embodiments, the linker is 6 amino acids long. In other embodiments, the linker is 7 amino acids long. In other embodiments, the linker is 8 amino acids long. In other embodiments, the linker is 9 amino acids long. In other embodiments, the linker is 10 amino acids long. In other embodiments, the linker is 11 amino acids long. In other embodiments, the linker is 12 amino acids long. In other embodiments, the linker is 13 amino acids long. In other embodiments, the linker is 14 amino acids long. In other embodiments, the linker is 15 amino acids long. In other embodiments, the linker is 16 amino acids long. In other embodiments, the linker is 17 amino acids long. In other embodiments, the linker is 18 amino acids long. In other embodiments, the linker is 19 amino acids long. In other embodiments, the linker is 20 amino acids long. In other embodiments, the linker is 21 amino acids long. In other embodiments, the linker is 22 amino acids long. In other embodiments, the linker is 23 amino acids long. In other embodiments, the linker is 24 amino acids long. In other embodiments, the linker is 25 amino acids long. In other embodiments, the linker is 26 amino acids long. In other embodiments, the linker is 27 amino acids long. In other embodiments, the linker is 28 amino acids long. In other embodiments, the linker is 29 amino acids long. In other embodiments, the linker is 30 amino acids long. In other embodiments, the linker is 31 amino acids long. In other embodiments, the linker is 32 amino acids long. In other embodiments, the linker is 33 amino acids long. In other embodiments, the linker is 34 amino acids long. In other embodiments, the linker is 35 amino acids long. In other embodiments, the linker is 36 amino acids long. In other embodiments, the linker is 37 amino acids long. In other embodiments, the linker is 38 amino acids long. In other embodiments, the linker is 39 amino acids long. In other embodiments, the linker is 40 amino acids long. Exemplary linkers that may be used are Gly rich linkers, Gly and Ser containing linkers, Gly and Ala containing linkers, Ala and Ser containing linkers, and other flexible linkers.

[0206] Other linker sequences may include portions of immunoglobulin hinge area, CL or CH1 derived from any immunoglobulin heavy or light chain isotype. Alternatively, a variety of non-proteinaceous polymers, including polyethylene glycol (PEG), polypropylene glycol, polyoxyalkylenes, or copolymers of polyethylene glycol and polypropylene glycol, may find use as linkers. Exemplary linkers that may be used are shown in Table 2. Additional linkers are described for example in Int. Pat. Publ. No. WO2019/060695.

TABLE 2
Linkers.

| Linker | | SEQ |
|---|---|---|
| name | Amino acid sequence | ID NO: |
| Linker 1 | GGSEGKSSGSGSESKSTGGS | 3 |
| Linker 2 | GGGSGGGS | 4 |
| Linker 3 | GGGSGGGSGGGS | 5 |
| Linker 4 | GGGSGGGSGGGSGGGS | 6 |
| Linker 5 | GGGSGGGSGGGSGGGSGGGS | 7 |
| Linker 6 | GGGGSGGGGSGGGGS | 8 |
| Linker 7 | GGGGSGGGGSGGGGSGGGGS | 9 |
| Linker 8 | GGGGSGGGGSGGGGSGGGGSGGGGS | 10 |
| Linker 9 | GSTSGSGKPGSGEGSTKG | 11 |
| Linker 10 | IRPRAIGGSKPRVA | 12 |
| Linker 11 | GKGGSGKGGSGKGGS | 13 |
| Linker 12 | GGKGSGGKGSGGKGS | 14 |
| Linker 13 | GGGKSGGGKSGGGKS | 15 |
| Linker 14 | GKGKSGKGKSGKGKS | 16 |
| Linker 15 | GGGKSGGKGSGKGGS | 17 |
| Linker 16 | GKPGSGKPGSGKPGS | 18 |
| Linker 17 | GKPGSGKPGSGKPGSGKPGS | 19 |
| Linker 18 | GKGKSGKGKSGKGKSGKGKS | 20 |
| Linker 19 | STAGDTHLGGEDFD | 21 |
| Linker 20 | GEGGSGEGGSGEGGS | 22 |
| Linker 21 | GGEGSGGEGSGGEGS | 23 |
| Linker 22 | GEGESGEGESGEGES | 24 |
| Linker 23 | GGGESGGEGSGEGGS | 25 |
| Linker 24 | GEGESGEGESGEGESGEGES | 26 |
| Linker 25 | GSTSGSGKPGSGEGSTKG | 27 |
| Linker 26 | PRGASKSGSASQTGSAPGS | 28 |
| Linker 27 | GTAAAGAGAAGGAAAGAAG | 29 |
| Linker 28 | GTSGSSGSGSGGSGSGGGG | 30 |
| Linker 29 | GKPGSGKPGSGKPGSGKPGS | 31 |
| Linker 30 | GSGS | 32 |
| Linker 31 | APAPAPAPAP | 33 |
| Linker 32 | APAPAPAPAPAPAPAPAPAP | 34 |
| Linker 33 | AEAAAKEAAAKEAAAAKEAAAAKEAAAA | 35 |
| | KAAA | |
| Linker 34 | GTEGKSSGSGSESKST | 36 |

[0207] In other embodiments, the scFv comprises, from the N- to C-terminus, a VH, a first linker (L1) and a VL (VH-L1-VL).

[0208] In other embodiments, the scFv comprises, from the N-to C-terminus, the VL, the L1 and the VH (VL-L1-VH).

[0209] In other embodiments, the L1 comprises the amino acid sequence of 3, 4, 5, 6, 7, 8, 9, 10, 11, 12, 13, 14, 15, 16, 17, 18, 19, 20, 21, 22, 23, 24, 25, 26, 27, 28, 29, 30, 31, 32, 33, 34, 35 or 36.

[0210] In other embodiments, the L1 comprises the amino acid sequence of SEQ ID NO: 3.

[0211] In other embodiments, the L1 comprises the amino acid sequence of SEQ ID NO: 4.

[0212] In other embodiments, the L1 comprises the amino acid sequence of SEQ ID NO: 5.

[0213] In other embodiments, the L1 comprises the amino acid sequence of SEQ ID NO: 6.

[0214] In other embodiments, the L1 comprises the amino acid sequence of SEQ ID NO: 7.

[0215] In other embodiments, the L1 comprises the amino acid sequence of SEQ ID NO: 8.

[0216] In other embodiments, the L1 comprises the amino acid sequence of SEQ ID NO: 9.

[0217] In other embodiments, the L1 comprises the amino acid sequence of SEQ ID NO: 10.

[0218] In other embodiments, the L1 comprises the amino acid sequence of SEQ ID NO: 11.

[0219] In other embodiments, the L1 comprises the amino acid sequence of SEQ ID NO: 12.

[0220] In other embodiments, the L1 comprises the amino acid sequence of SEQ ID NO: 13.

[0221] In other embodiments, the L1 comprises the amino acid sequence of SEQ ID NO: 14.

[0222] In other embodiments, the L1 comprises the amino acid sequence of SEQ ID NO: 15.

[0223] In other embodiments, the L1 comprises the amino acid sequence of SEQ ID NO: 16.

[0224] In other embodiments, the L1 comprises the amino acid sequence of SEQ ID NO: 17.

[0225] In other embodiments, the L1 comprises the amino acid sequence of SEQ ID NO: 17.

[0226] In other embodiments, the L1 comprises the amino acid sequence of SEQ ID NO: 19.

[0227] In other embodiments, the L1 comprises the amino acid sequence of SEQ ID NO: 20.

[0228] In other embodiments, the L1 comprises the amino acid sequence of SEQ ID NO: 21.

[0229] In other embodiments, the L1 comprises the amino acid sequence of SEQ ID NO: 22.

[0230] In other embodiments, the L1 comprises the amino acid sequence of SEQ ID NO: 23.

[0231] In other embodiments, the L1 comprises the amino acid sequence of SEQ ID NO: 24.

[0232] In other embodiments, the L1 comprises the amino acid sequence of SEQ ID NO: 25.

[0233] In other embodiments, the L1 comprises the amino acid sequence of SEQ ID NO: 26.

[0234] In other embodiments, the L1 comprises the amino acid sequence of SEQ ID NO: 27.

[0235] In other embodiments, the L1 comprises the amino acid sequence of SEQ ID NO: 28.

[0236] In other embodiments, the L1 comprises the amino acid sequence of SEQ ID NO: 29.

[0237] In other embodiments, the L1 comprises the amino acid sequence of SEQ ID NO: 30.

[0238] In other embodiments, the L1 comprises the amino acid sequence of SEQ ID NO: 31.

[0239] In other embodiments, the L1 comprises the amino acid sequence of SEQ ID NO: 32.

[0240] In other embodiments, the L1 comprises the amino acid sequence of SEQ ID NO: 33.

[0241] In other embodiments, the L1 comprises the amino acid sequence of SEQ ID NO: 34.

[0242] In other embodiments, the L1 comprises the amino acid sequence of SEQ ID NO: 35.

[0243] In other embodiments, the L1 comprises the amino acid sequence of SEQ ID NO: 36.

[0244] In other embodiments, the scFv comprises
[0245] a HCDR1, a HCDR2 and a HCDR3 of a heavy chain variable region (VH) of SEQ ID NO: 55 and a light chain complementarity determining region (LCDR) 1, a LCDR2 and a LCDR3 of a light chain variable region (VL) of SEQ ID NO: 59;
[0246] the HCDR1, the HCDR2 and the HCDR3 of the VH of SEQ ID NO: 55 and the LCDR1, the LCDR2 and the LCDR3 of the VL of SEQ ID NO: 58;
[0247] the HCDR1, the HCDR2 and the HCDR3 of the VH of SEQ ID NO: 54 and the LCDR1, the LCDR2 and the LCDR3 of the VL of SEQ ID NO: 56; or
[0248] the HCDR1, the HCDR2 and the HCDR3 of the VH of SEQ ID NO: 48 and the LCDR1, the LCDR2 and the LCDR3 of the VL of SEQ ID NO: 58;
[0249] wherein the amino acid in position N106 of SEQ ID NO: 55, 54, or 48 is optionally substituted with the amino acid selected from the group consisting of A, G, S, F, E, T, R, V, I, Y, L, P, Q, and K, wherein the residue numbering starts from N-terminus of SEQ ID NO: 55, 54, or 48.

[0250] In other embodiments, the scFv comprises the HCDR1, the HCDR1, the HCDR3, the LCDR1, the LCDR2 and the LCDR3 of SEQ ID NOs: 70, 71, 86, 79, 80, and 81, respectively.

[0251] In other embodiments, the scFv comprises the HCDR1, the HCDR1, the HCDR3, the LCDR1, the LCDR2 and the LCDR3 of

[0252] SEQ ID NOs: 70, 71, 72, 79, 80, and 81, respectively;

[0253] SEQ ID NOs: 70, 71, 87, 79, 80, and 81, respectively; or

[0254] SEQ ID NOs: 70, 71, 90, 79, 80, and 81, respectively.

[0255] In other embodiments, the scFv comprises the HCDR1, the HCDR1, the HCDR3, the LCDR1, the LCDR2 and the LCDR3 of SEQ ID NOs: 70, 71, 72, 79, 80, and 81, respectively.

[0256] In other embodiments, the scFv comprises the HCDR1, the HCDR1, the HCDR3, the LCDR1, the LCDR2 and the LCDR3 of SEQ ID NOs: 70, 71, 87, 79, 80, and 81, respectively.

[0257] In other embodiments, the scFv comprises the HCDR1, the HCDR1, the HCDR3, the LCDR1, the LCDR2 and the LCDR3 of SEQ ID NOs: 70, 71, 90, 79, 80, and 81, respectively.

[0258] In other embodiments, the scFv comprises the VH of SEQ ID NOs: 55, 54, or 48 and the VL of SEQ ID NOs: 59, 58, or 56.

[0259] In other embodiments, the scFv comprises the VH of SEQ ID NO: 55 and the VL of SEQ ID NO: 59.

[0260] In other embodiments, the scFv comprises the VH of SEQ ID NO: 55 and the VL of SEQ ID NO: 58.

[0261] In other embodiments, the scFv comprises the VH of SEQ ID NO: 54 and the VL of SEQ ID NO: 56.

[0262] In other embodiments, the scFv comprises the VH of SEQ ID NO: 48 and the VL of SEQ ID NO: 58.

[0263] In other embodiments, the scFv comprises the VH of SEQ ID NO: 88 and the VL of SEQ ID NO: 58.

[0264] In other embodiments, the scFv comprises the VH of SEQ ID NO: 242 and the VL of SEQ ID NO: 58.

[0265] In other embodiments, the scFv comprises the amino acid sequence of SEQ ID NOs: 96, 97, 98, 99, 100, 101, 102, 103, 104, 105, 106, 107, 108, 109, 110, 111, 112, 113, 114, 115, 116, 117, 118, 119, 120, 121, 122, 123, 124, 125, or 126.

[0266] In other embodiments, the scFv comprises the amino acid sequence of SEQ ID NO: 96.

[0267] In other embodiments, the scFv comprises the amino acid sequence of SEQ ID NO: 97.

[0268] In other embodiments, the scFv comprises the amino acid sequence of SEQ ID NO: 98.

[0269] In other embodiments, the scFv comprises the amino acid sequence of SEQ ID NO: 99.

[0270] In other embodiments, the scFv comprises the amino acid sequence of SEQ ID NO: 100.

[0271] In other embodiments, the scFv comprises the amino acid sequence of SEQ ID NO: 101.

[0272] In other embodiments, the scFv comprises the amino acid sequence of SEQ ID NO: 102.

[0273] In other embodiments, the scFv comprises the amino acid sequence of SEQ ID NO: 103.

[0274] In other embodiments, the scFv comprises the amino acid sequence of SEQ ID NO: 104.

[0275] In other embodiments, the scFv comprises the amino acid sequence of SEQ ID NO: 105.

[0276] In other embodiments, the scFv comprises the amino acid sequence of SEQ ID NO: 106.

[0277] In other embodiments, the scFv comprises the amino acid sequence of SEQ ID NO: 107.

[0278] In other embodiments, the scFv comprises the amino acid sequence of SEQ ID NO: 108.

[0279] In other embodiments, the scFv comprises the amino acid sequence of SEQ ID NO: 109.

[0280] In other embodiments, the scFv comprises the amino acid sequence of SEQ ID NO: 110.

[0281] In other embodiments, the scFv comprises the amino acid sequence of SEQ ID NO: 111.

[0282] In other embodiments, the scFv comprises the amino acid sequence of SEQ ID NO: 112.

[0283] In other embodiments, the scFv comprises the amino acid sequence of SEQ ID NO: 113.

[0284] In other embodiments, the scFv comprises the amino acid sequence of SEQ ID NO: 114.

[0285] In other embodiments, the scFv comprises the amino acid sequence of SEQ ID NO: 115.

[0286] In other embodiments, the scFv comprises the amino acid sequence of SEQ ID NO: 116.

[0287] In other embodiments, the scFv comprises the amino acid sequence of SEQ ID NO: 117.

[0288] In other embodiments, the scFv comprises the amino acid sequence of SEQ ID NO: 118.

[0289] In other embodiments, the scFv comprises the amino acid sequence of SEQ ID NO: 119.

[0290] In other embodiments, the scFv comprises the amino acid sequence of SEQ ID NO: 120.

[0291] In other embodiments, the scFv comprises the amino acid sequence of SEQ ID NO: 121.

[0292] In other embodiments, the scFv comprises the amino acid sequence of SEQ ID NO: 122.

[0293] In other embodiments, the scFv comprises the amino acid sequence of SEQ ID NO: 123.

[0294] In other embodiments, the scFv comprises the amino acid sequence of SEQ ID NO: 124.

[0295] In other embodiments, the scFv comprises the amino acid sequence of SEQ ID NO: 125.

[0296] In other embodiments, the scFv comprises the amino acid sequence of SEQ ID NO: 126.

[0297] Other Antigen Binding Domains that Bind CD3ε

[0298] Any of the VH and the VL domains identified herein that bind CD3ε may also be engineered into Fab, F(ab′)₂, Fd or Fv format and their binding to CD3ε and thermostability may be assessed using the assays described herein. In certain embodiments thermostability is improved 2 fold, 3 fold, 4 fold, 5 fold, upto 100 fold, with every integer in between (for example, 6 fold, 7 fold, 8 fold, 9 fold, 10 fold, and so forth), compared to the murine Cris-7 parent antibody at 55° C., 60° C., and/or 65° C. by the methods described herein.

[0299] In other embodiments, the Fab comprises
[0300] a HCDR1, a HCDR2 and a HCDR3 of a heavy chain variable region (VH) of SEQ ID NO: 55 and a light chain complementarity determining region (LCDR) 1, a LCDR2 and a LCDR3 of a light chain variable region (VL) of SEQ ID NO: 59;
[0301] the HCDR1, the HCDR2 and the HCDR3 of the VH of SEQ ID NO: 55 and the LCDR1, the LCDR2 and the LCDR3 of the VL of SEQ ID NO: 58;
[0302] the HCDR1, the HCDR2 and the HCDR3 of the VH of SEQ ID NO: 54 and the LCDR1, the LCDR2 and the LCDR3 of the VL of SEQ ID NO: 56; or
[0303] the HCDR1, the HCDR2 and the HCDR3 of the VH of SEQ ID NO: 48 and the LCDR1, the LCDR2 and the LCDR3 of the VL of SEQ ID NO: 58;

[0304] wherein the amino acid in position N106 of SEQ ID NO: 55, 54, or 48 is optionally substituted with the amino acid selected from the group consisting of A, G, S, F, E, T, R, V, I, Y, L, P, Q, and K, wherein the residue numbering starts from N-terminus of SEQ ID NO: 55, 54, or 48.

[0305] In other embodiments, the Fab comprises the HCDR1, the HCDR1, the HCDR3, the LCDR1, the LCDR2 and the LCDR3 of SEQ ID NOs: 70, 71, 86, 79, 80, and 81, respectively.

[0306] In other embodiments, the Fab comprises the HCDR1, the HCDR1, the HCDR3, the LCDR1, the LCDR2 and the LCDR3 of
[0307] SEQ ID NOs: 70, 71, 72, 79, 80, and 81, respectively;
[0308] SEQ ID NOs: 70, 71, 87, 79, 80, and 81, respectively; or
[0309] SEQ ID NOs: 70, 71, 90, 79, 80, and 81, respectively.

[0310] In other embodiments, the Fab comprises the HCDR1, the HCDR2, the HCDR3, the LCDR1, the LCDR2 and the LCDR3 of SEQ ID NOs: 70, 71, 72, 79, 80, and 81, respectively.

[0311] In other embodiments, the Fab comprises the HCDR1, the HCDR1, the HCDR3, the LCDR1, the LCDR2 and the LCDR3 of SEQ ID NOs: 70, 71, 87, 79, 80, and 81, respectively.

[0312] In other embodiments, the Fab comprises the HCDR1, the HCDR1, the HCDR3, the LCDR1, the LCDR2 and the LCDR3 of SEQ ID NOs: 70, 71, 90, 79, 80, and 81, respectively.

[0313] In other embodiments, the Fab comprises the VH of SEQ ID NO: 55 and the VL of SEQ ID NO: 59.

[0314] In other embodiments, the Fab comprises the VH of SEQ ID NO: 55 and the VL of SEQ ID NO: 58.

[0315] In other embodiments, the Fab comprises the VH of SEQ ID NO: 54 and the VL of SEQ ID NO: 56.

[0316] In other embodiments, the Fab comprises the VH of SEQ ID NO: 48 and the VL of SEQ ID NO: 58.

[0317] In other embodiments, the Fab comprises the VH of SEQ ID NO: 88 and the VL of SEQ ID NO: 58.

[0318] In other embodiments, the Fab comprises the VH of SEQ ID NO: 242 and the VL of SEQ ID NO: 58.

[0319] In other embodiments, the F(ab′)2 comprises
[0320] a HCDR1, a HCDR2 and a HCDR3 of a heavy chain variable region (VH) of SEQ ID NO: 55 and a light chain complementarity determining region (LCDR) 1, a LCDR2 and a LCDR3 of a light chain variable region (VL) of SEQ ID NO: 59;

[0321] the HCDR1, the HCDR2 and the HCDR3 of the VH of SEQ ID NO: 55 and the LCDR1, the LCDR2 and the LCDR3 of the VL of SEQ ID NO: 58;
[0322] the HCDR1, the HCDR2 and the HCDR3 of the VH of SEQ ID NO: 54 and the LCDR1, the LCDR2 and the LCDR3 of the VL of SEQ ID NO: 56; or
[0323] the HCDR1, the HCDR2 and the HCDR3 of the VH of SEQ ID NO: 48 and the LCDR1, the LCDR2 and the LCDR3 of the VL of SEQ ID NO: 58;

[0324] wherein the amino acid in position N106 of SEQ ID NO: 55, 54, or 48 is optionally substituted with the amino acid selected from the group consisting of A, G, S, F, E, T, R, V, I, Y, L, P, Q, and K, wherein the residue numbering starts from N-terminus of SEQ ID NO: 55, 54, or 48.

[0325] In other embodiments, the F(ab′)₂ comprises the HCDR1, the HCDR1, the HCDR3, the LCDR1, the LCDR2 and the LCDR3 of SEQ ID NOs: 70, 71, 86, 79, 80, and 81, respectively.

[0326] In other embodiments, the F(ab′)2 comprises the HCDR1, the HCDR1, the HCDR3, the LCDR1, the LCDR2 and the LCDR3 of
[0327] SEQ ID NOs: 70, 71, 72, 79, 80, and 81, respectively;
[0328] SEQ ID NOs: 70, 71, 87, 79, 80, and 81, respectively; or
[0329] SEQ ID NOs: 70, 71, 90, 79, 80, and 81, respectively.

[0330] In other embodiments, the F(ab′)2 comprises the HCDR1, the HCDR2, the HCDR3, the LCDR1, the LCDR2 and the LCDR3 of SEQ ID NOs: 70, 71, 72, 79, 80, and 81, respectively.

[0331] In other embodiments, the F(ab′)2 comprises the HCDR1, the HCDR1, the HCDR3, the LCDR1, the LCDR2 and the LCDR3 of SEQ ID NOs: 70, 71, 87, 79, 80, and 81, respectively.

[0332] In other embodiments, the F(ab′)2 comprises the HCDR1, the HCDR1, the HCDR3, the LCDR1, the LCDR2 and the LCDR3 of SEQ ID NOs: 70, 71, 90, 79, 80, and 81, respectively.

[0333] In other embodiments, the F(ab′)₂ comprises the VH of SEQ ID NO: 55 and the VL of SEQ ID NO: 59.

[0334] In other embodiments, the F(ab′)₂ comprises the VH of SEQ ID NO: 55 and the VL of SEQ ID NO: 58.

[0335] In other embodiments, the F(ab′)2 comprises the VH of SEQ ID NO: 54 and the VL of SEQ ID NO: 56.

[0336] In other embodiments, the F(ab′)2 comprises the VH of SEQ ID NO: 48 and the VL of SEQ ID NO: 58.

[0337] In other embodiments, the F(ab′)2 comprises the VH of SEQ ID NO: 88 and the VL of SEQ ID NO: 58.

[0338] In other embodiments, the F(ab′)2 comprises the VH of SEQ ID NO: 242 and the VL of SEQ ID NO: 58.

[0339] In other embodiments, the Fv comprises
[0340] a HCDR1, a HCDR2 and a HCDR3 of a heavy chain variable region (VH) of SEQ ID NO: 55 and a light chain complementarity determining region (LCDR) 1, a LCDR2 and a LCDR3 of a light chain variable region (VL) of SEQ ID NO: 59;
[0341] the HCDR1, the HCDR2 and the HCDR3 of the VH of SEQ ID NO: 55 and the LCDR1, the LCDR2 and the LCDR3 of the VL of SEQ ID NO: 58;
[0342] the HCDR1, the HCDR2 and the HCDR3 of the VH of SEQ ID NO: 54 and the LCDR1, the LCDR2 and the LCDR3 of the VL of SEQ ID NO: 56; or
[0343] the HCDR1, the HCDR2 and the HCDR3 of the VH of SEQ ID NO: 48 and the LCDR1, the LCDR2 and the LCDR3 of the VL of SEQ ID NO: 58;

[0344] wherein the amino acid in position N106 of SEQ ID NO: 55, 54, or 48 is optionally substituted with the amino acid selected from the group consisting of A, G, S, F, E, T, R, V, I, Y, L, P, Q, and K, wherein the residue numbering starts from N-terminus of SEQ ID NO: 55, 54, or 48.

[0345] In other embodiments, the Fv comprises the HCDR1, the HCDR1, the HCDR3, the LCDR1, the LCDR2 and the LCDR3 of SEQ ID NOs: 70, 71, 86, 79, 80, and 81, respectively.

[0346] In other embodiments, the Fv comprises the HCDR1, the HCDR1, the HCDR3, the LCDR1, the LCDR2 and the LCDR3 of
[0347] SEQ ID NOs: 70, 71, 72, 79, 80, and 81, respectively;
[0348] SEQ ID NOs: 70, 71, 87, 79, 80, and 81, respectively; or
[0349] SEQ ID NOs: 70, 71, 90, 79, 80, and 81, respectively.

[0350] In other embodiments, the Fv comprises the HCDR1, the HCDR2, the HCDR3, the LCDR1, the LCDR2 and the LCDR3 of SEQ ID NOs: 70, 71, 72, 79, 80, and 81, respectively.

[0351] In other embodiments, the Fv comprises the HCDR1, the HCDR1, the HCDR3, the LCDR1, the LCDR2 and the LCDR3 of SEQ ID NOs: 70, 71, 87, 79, 80, and 81, respectively.

[0352] In other embodiments, the Fv comprises the HCDR1, the HCDR1, the HCDR3, the LCDR1, the LCDR2 and the LCDR3 of SEQ ID NOs: 70, 71, 90, 79, 80, and 81, respectively.

[0353] In other embodiments, the Fv comprises the VH of SEQ ID NO: 55 and the VL of SEQ ID NO: 59.

[0354] In other embodiments, the Fv comprises the VH of SEQ ID NO: 55 and the VL of SEQ ID NO: 58.

[0355] In other embodiments, the Fv comprises the VH of SEQ ID NO: 54 and the VL of SEQ ID NO: 56.

[0356] In other embodiments, the Fv comprises the VH of SEQ ID NO: 48 and the VL of SEQ ID NO: 58.

[0357] In other embodiments, the Fv comprises the VH of SEQ ID NO: 88 and the VL of SEQ ID NO: 58.

[0358] In other embodiments, the Fv comprises the VH of SEQ ID NO: 242 and the VL of SEQ ID NO: 58.

[0359] In other embodiments, the Fd comprises a heavy chain complementarity determining region (HCDR) 1, a HCDR2 and a HCDR3 of a heavy chain variable region (VH) of SEQ ID NOs: 55, 54, or 48.

[0360] In other embodiments, the Fd comprises the HCDR1, the HCDR2, and the HCDR3 of SEQ ID NOs: 70, 71, and 86, respectively.

[0361] In other embodiments, the Fd comprises the HCDR1, the HCDR1, and the HCDR3 of SEQ ID NOs: 70, 71, and 72, respectively.

[0362] In other embodiments, the Fd comprises the HCDR1, the HCDR1, and the HCDR3 of SEQ ID NOs: 70, 71, and 87, respectively.

[0363] In other embodiments, the Fd comprises the HCDR1, the HCDR1, and the HCDR3 of SEQ ID NOs: 70, 71, and 90, respectively.

[0364] In other embodiments, the Fd comprises the VH of SEQ ID NO: 55.

[0365] In other embodiments, the Fd comprises the VH of SEQ ID NO: 54.

[0366] In other embodiments, the Fd comprises the VH of SEQ ID NO: 48.

[0367] In other embodiments, the Fd comprises the VH of SEQ ID NO: 88.

[0368] In other embodiments, the Fd comprises the VH of SEQ ID NO: 242.

Homologous Antigen Binding Domains and Antigen Binding Domains with Conservative Substitutions

[0369] Variants of the antigen binding domains that bind CD3ε are within the scope of the disclosure. For example, variants may comprise 1, 2, 3, 4, 5, 6, 7, 8, 9, 10, 11, 12, 13, 14, 15, 16, 17, 18, 19, 20, 21, 22, 23, 24, 25, 26, 27, 28 or 29 amino acid substitutions in the antigen binding domain that bind CD3ε as long as they retain or have improved functional properties when compared to the parent antigen binding domains. In other embodiments, the sequence identity may be about 80%, 81%, 82%, 83%, 84%, 85%, 86%, 87%, 88%, 89%, 90%, 91%, 92%, 93%, 94%, 95%, 96%, 97%, 98% or 99% to the antigen binding domains that bind CD3ε of the disclosure. In other embodiments, the variation is in the framework regions. In other embodiments, variants are generated by conservative substitutions.

[0370] For example, the antigen binding domains that bind CD3ε may comprise substitutions at residue position N106 (residue numbering from N-terminus of SEQ ID NO: 55, 54, or 48). Conservative substitutions may be made at any indicated positions and the resulting variant antigen binding domains that bind CD3ε are tested for their desired characteristics in the assays described herein.

[0371] Also provided are antigen binding domains that bind CD3ε comprising the VH and the VL which are at least 80% identical to
[0372] the VH of SEQ ID NO: 55 and the VL of SEQ ID NO: 59;
[0373] the VH of SEQ ID NO: 55 and the VL of SEQ ID NO: 58;
[0374] the VH of SEQ ID NO: 54 and the VL of SEQ ID NO: 56;
[0375] the VH of SEQ ID NO: 48 and the VL of SEQ ID NO: 58;
[0376] the VH of SEQ ID NO: 88 and the VL of SEQ ID NO: 58; or
[0377] the VH of SEQ ID NO: 242 and the VL of SEQ ID NO: 58.

[0378] In other embodiments, the identity is 85%. In other embodiments, the identity is 90%. In other embodiments, the identity is 91%. In other embodiments, the identity is 91%. In other embodiments, the identity is 92%. In other embodiments, the identity is 93%. In other embodiments, the identity is 94%. In other embodiments, the identity is 94%. In other embodiments, the identity is 95%. In other embodiments, the identity is 96%. In other embodiments, the identity is 97%. In other embodiments, the identity is 98%. In other embodiments, the identity is 99%.

[0379] The percent identity between the two sequences is a function of the number of identical positions shared by the sequences (i.e., % identity=number of identical positions/total number of positions ×100), taking into account the number of gaps, and the length of each gap, which need to be introduced for optimal alignment of the two sequences.

[0380] The percent identity between two amino acid sequences may be determined using the algorithm of E. Meyers and W. Miller (Comput Appl Biosci 4:11-17 (1988)) which has been incorporated into the ALIGN program (version 2.0), using a PAM120 weight residue table, a gap length penalty of 12 and a gap penalty of 4. In addition, the percent identity between two amino acid sequences may be determined using the Needleman and Wunsch (J Mol Biol 48:444-453 (1970)) algorithm which has been incorporated into the GAP program in the GCG software package (can be retrieved from the Internet <URL: http://www.gcg.com>), using either a Blossum 62 matrix or a PAM250 matrix, and a gap weight of 16, 14, 12, 10, 8, 6, or 4 and a length weight of 1, 2, 3, 4, 5, or 6.

[0381] In other embodiments, variant antigen binding domains that bind CD3ε comprise one or two conservative substitutions in any of the CDR regions, while retaining desired functional properties of the parent antigen binding fragments that bind CD3ε.

[0382] “Conservative modifications” refer to amino acid modifications that do not significantly affect or alter the binding characteristics of the antibody containing the amino acid modifications. Conservative modifications include amino acid substitutions, additions and deletions. Conservative amino acid substitutions are those in which the amino acid is replaced with an amino acid residue having a similar side chain. The families of amino acid residues having similar side chains are well defined and include amino acids with acidic side chains (e.g., aspartic acid, glutamic acid), basic side chains (e.g., lysine, arginine, histidine), nonpolar side chains (e.g., alanine, valine, leucine, isoleucine, proline, phenylalanine, methionine), uncharged polar side chains (e.g., glycine, asparagine, glutamine, cysteine, serine, threonine, tyrosine, tryptophan), aromatic side chains (e.g., phenylalanine, tryptophan, histidine, tyrosine), aliphatic side chains (e.g., glycine, alanine, valine, leucine, isoleucine, serine, threonine), amide (e.g., asparagine, glutamine), beta-branched side chains (e.g., threonine, valine, isoleucine) and sulfur-containing side chains (cysteine, methionine). Furthermore, any native residue in the polypeptide may also be substituted with alanine, as has been previously described for alanine scanning mutagenesis (MacLennan et al., (1988) Acta Physiol Scand Suppl 643:55-67; Sasaki et al., (1988) Adv Biophys 35:1-24). Amino acid substitutions to the antibodies of the invention may be made by known methods for example by PCR mutagenesis (U.S. Pat. No. 4,683,195). Alternatively, libraries of variants may be generated for example using random (NNK) or non-random codons, for example DVK codons, which encode 11 amino acids (Ala, Cys, Asp, Glu, Gly, Lys, Asn, Arg, Ser, Tyr, Trp). The resulting variants may be tested for their characteristics using assays described herein.

Methods of Generating Antigen Binding Fragment that Bind CD3ε

[0383] Antigen binding domains that bind CD3ε provided in the disclosure may be generated using various technologies. For example, the hybridoma method of Kohler and Milstein may be used to identify VH/VL pairs that bind CD3ε. In the hybridoma method, a mouse or other host animal, such as a hamster, rat or chicken is immunized with human and/or cyno CD3ε, followed by fusion of spleen cells from immunized animals with myeloma cells using standard methods to form hybridoma cells. Colonies arising from single immortalized hybridoma cells may be screened for production of the antibodies containing the antigen binding domains that bind CD3ε with desired properties, such as specificity of binding, cross-reactivity or lack thereof, affinity for the antigen, and any desired functionality.

[0384] Antigen binding domains that bind CD3ε generated by immunizing non-human animals may be humanized. Exemplary humanization techniques including selection of human acceptor frameworks include CDR grafting (U.S. Pat. No. 5,225,539), SDR grafting (U.S. Pat. No. 6,818,749), Resurfacing (Padlan, (1991) Mol Immunol 28:489-499), Specificity Determining Residues Resurfacing (U.S. Patent Publ. No. 2010/0261620), human framework adaptation (U.S. Pat. No. 8,748,356) or superhumanization (U.S. Pat. No. 7,709,226). In these methods, CDRs or a subset of CDR residues of parental antibodies are transferred onto human frameworks that may be selected based on their overall homology to the parental frameworks, based on similarity in CDR length, or canonical structure identity, or a combination thereof.

[0385] Humanized antigen biding domains may be further optimized to improve their selectivity or affinity to a desired antigen by incorporating altered framework support residues to preserve binding affinity (backmutations) by techniques such as those described in Int. Patent Publ. Nos. WO1090/007861 and WO1992/22653, or by introducing variation at any of the CDRs for example to improve affinity of the antigen binding domain.

[0386] Transgenic animals, such as mice, rat or chicken carrying human immunoglobulin (Ig) loci in their genome may be used to generate antigen binding fragments that bind CD3ε, and are described in for example U.S. Pat. No. 6,150,584, Int. Patent Publ. No. WO1999/45962, Int. Patent Publ. Nos. WO2002/066630, WO2002/43478, WO2002/043478 and WO1990/04036. The endogenous immunoglobulin loci in such animal may be disrupted or deleted, and at least one complete or partial human immunoglobulin locus may be inserted into the genome of the animal using homologous or non-homologous recombination, using transchromosomes, or using minigenes. Companies such as Regeneron (<URL: http://www.regeneron.com>), Harbour Antibodies (http://www.harbourantibodies.com), Open Monoclonal Technology, Inc. (OMT) (<URL: http://www.omtinc.net>), KyMab (<URL: http://www.kymab.com>), Trianni (<URL: http://www.trianni.com>) and Ablexis (<URL: http://www.ablexis.com>) may be engaged to provide human antibodies directed against a selected antigen using technologies as described above.

[0387] Antigen binding domains that bind CD3ε may be selected from a phage display library, where the phage is engineered to express human immunoglobulins or portions thereof such as Fabs, single chain antibodies (scFv), or unpaired or paired antibody variable regions. The antigen binding domains that bind CD3ε may be isolated for example from phage display library expressing antibody heavy and light chain variable regions as fusion proteins with bacteriophage pIX coat protein as described in Shi et al., (2010) J Mol Biol 397:385-96, and Int. Patent Publ. No. WO09/085462). The libraries may be screened for phage binding to human and/or cyno CD3ε and the obtained positive clones may be further characterized, the Fabs isolated from the clone lysates, and converted to scFvs or other configurations of antigen binding fragments.

[0388] Preparation of immunogenic antigens and expression and production of antigen binding domains of the disclosure may be performed using any suitable technique, such as recombinant protein production. The immunogenic antigens may be administered to an animal in the form of purified protein, or protein mixtures including whole cells or cell or tissue extracts, or the antigen may be formed de novo in the animal's body from nucleic acids encoding said antigen or a portion thereof.

### Conjugation to Half-Life Extending Moieties

[0389] The antigen binding domains that bind CD3ε of the disclosure may be conjugated to a half-life extending moiety. Exemplary half-life extending moieties are albumin, albumin variants, albumin-binding proteins and/or domains, transferrin and fragments and analogues thereof, immunoglobulins (Ig) or fragments thereof, such as Fc regions. Amino acid sequences of the aforementioned half-life extending moieties are known. Ig or fragments thereof include all isotypes (i.e., IgG1, IgG2, IgG3, IgG4, IgM, IgA and IgE).

[0390] Additional half-life extending moieties that may be conjugated to the antigen binding domains that bind CD3ε of the disclosure include polyethylene glycol (PEG) molecules, such as PEG5000 or PEG20,000, fatty acids and fatty acid esters of different chain lengths, for example laurate, myristate, stearate, arachidate, behenate, oleate, arachidonate, octanedioic acid, tetradecanedioic acid, octadecanedioic acid, docosanedioic acid, and the like, polylysine, octane, carbohydrates (dextran, cellulose, oligo- or polysaccharides) for desired properties. These moieties may be direct fusions with the antigen binding domains that bind CD3ε of the disclosure and may be generated by standard cloning and expression techniques. Alternatively, well known chemical coupling methods may be used to attach the moieties to recombinantly produced antigen binding domains that bind CD3ε of the disclosure.

[0391] A pegyl moiety may for example be conjugated to the antigen binding domain that bind CD3ε of the disclosure by incorporating a cysteine residue to the C-terminus of the antigen binding domain that bind CD3ε of the disclosure, or engineering cysteines into residue positions that face away from the CD3ε binding site and attaching a pegyl group to the cysteine using well known methods.

[0392] In other embodiments, the antigen binding fragment that binds CD3ε is conjugated to a half-life extending moiety.

[0393] In other embodiments, the half-life extending moiety is an immunoglobulin (Ig), a fragment of the Ig, an Ig constant region, a fragment of the Ig constant region, a Fc region, transferrin, albumin, an albumin binding domain or polyethylene glycol. In other embodiments, the half-life extending moiety is an Ig constant region.

[0394] In other embodiments, the half-life extending moiety is the Ig.

[0395] In other embodiments, the half-life extending moiety is the fragment of the Ig.

[0396] In other embodiments, the half-life extending moiety is the Ig constant region.

[0397] In other embodiments, the half-life extending moiety is the fragment of the Ig constant region.

[0398] In other embodiments, the half-life extending moiety is the Fc region.

[0399] In other embodiments, the half-life extending moiety is albumin.

[0400] In other embodiments, the half-life extending moiety is the albumin binding domain.

[0401] In other embodiments, the half-life extending moiety is transferrin.

[0402] In other embodiments, the half-life extending moiety is polyethylene glycol.

[0403] The antigen binding domains that bind CD3ε conjugated to a half-life extending moiety may be evaluated for their pharmacokinetic properties utilizing known in vivo models.

### Conjugation to Immunoglobulin (Ig) Constant Regions or Fragments of the Ig Constant Regions

[0404] The antigen binding domains that bind CD3ε of the disclosure may be conjugated to an Ig constant region or a fragment of the Ig constant region to impart antibody-like properties, including Fc effector functions C1q binding, complement dependent cytotoxicity (CDC), Fc receptor binding, antibody-dependent cell-mediated cytotoxicity (ADCC), phagocytosis or down regulation of cell surface receptors (e.g., B cell receptor; BCR). The Ig constant region or the fragment of the Ig constant region functions also as a half-life extending moiety as discussed herein. The antigen binding domains that bind CD3ε of the disclosure may be engineered into conventional full-length antibodies using standard methods. The full-length antibodies comprising the antigen binding domain that binds CD3ε may further be engineered as described herein.

[0405] Immunoglobulin heavy chain constant region comprised of subdomains CH1, hinge, CH2 and CH3. The CH1 domain spans residues A118-V215, the CH2 domain residues A231-K340 and the CH3 domain residues G341-K447 on the heavy chain, residue numbering according to the EU Index. In some instances, G341 is referred as a CH2 domain residue. Hinge is generally defined as including E216 and terminating at P230 of human IgG1. Ig Fc region comprises at least the CH2 and the CH3 domains of the Ig constant region, and therefore comprises at least a region from about A231 to K447 of Ig heavy chain constant region.

[0406] The invention also provides an antigen binding domain that binds CD3ε conjugated to an immunoglobulin (Ig) constant region or a fragment of the Ig constant region.

[0407] In other embodiments, the Ig constant region is a heavy chain constant region

[0408] In other embodiments, the Ig constant region is a light chain constant region.

[0409] In other embodiments, the fragment of the Ig constant region comprises a Fc region.

[0410] In other embodiments, the fragment of the Ig constant region comprises a CH2 domain.

[0411] In other embodiments, the fragment of the Ig constant region comprises a CH3 domain.

[0412] In other embodiments, the fragment of the Ig constant region comprises the CH2 domain and the CH3 domain.

[0413] In other embodiments, the fragment of the Ig constant region comprises at least portion of a hinge, the CH2 domain and the CH3 domain. Portion of the hinge refers to one or more amino acid residues of the Ig hinge.

[0414] In other embodiments, the fragment of the Ig constant region comprises the hinge, the CH2 domain and the CH3 domain.

[0415] In other embodiments, the antigen binding domain that binds CD3ε is conjugated to the N-terminus of the Ig constant region or the fragment of the Ig constant region.

[0416] In other embodiments, the antigen binding domain that binds CD3ε is conjugated to the C-terminus of the Ig constant region or the fragment of the Ig constant region.

[0417] In other embodiments, the antigen binding domain that binds CD3ε is conjugated to the Ig constant region or the fragment of the Ig constant region via a second linker (L2).

[0418] In other embodiments, the L2 comprises the amino acid sequence of SEQ ID NOs: 3, 4, 5, 6, 7, 8, 9, 10, 11, 12, 13, 14, 15, 16, 17, 18, 19, 20, 21, 22, 23, 24, 25, 26, 27, 28, 29, 30, 31, 32, 33, 34, 35 or 36.

[0419] In other embodiments, the L2 comprises the amino acid sequence of SEQ ID NO: 3.

[0420] In other embodiments, the L2 comprises the amino acid sequence of SEQ ID NO: 4.

[0421] In other embodiments, the L2 comprises the amino acid sequence of SEQ ID NO: 5.

[0422] In other embodiments, the L2 comprises the amino acid sequence of SEQ ID NO: 6.

[0423] In other embodiments, the L2 comprises the amino acid sequence of SEQ ID NO: 7.

[0424] In other embodiments, the L2 comprises the amino acid sequence of SEQ ID NO: 8.

[0425] In other embodiments, the L2 comprises the amino acid sequence of SEQ ID NO: 9.

[0426] In other embodiments, the L2 comprises the amino acid sequence of SEQ ID NO: 10.

[0427] In other embodiments, the L2 comprises the amino acid sequence of SEQ ID NO: 11.

[0428] In other embodiments, the L2 comprises the amino acid sequence of SEQ ID NO: 12.

[0429] In other embodiments, the L2 comprises the amino acid sequence of SEQ ID NO: 13.

[0430] In other embodiments, the L2 comprises the amino acid sequence of SEQ ID NO: 14.

[0431] In other embodiments, the L2 comprises the amino acid sequence of SEQ ID NO: 15.

[0432] In other embodiments, the L2 comprises the amino acid sequence of SEQ ID NO: 16.

[0433] In other embodiments, the L2 comprises the amino acid sequence of SEQ ID NO: 17.

[0434] In other embodiments, the L2 comprises the amino acid sequence of SEQ ID NO: 17.

[0435] In other embodiments, the L2 comprises the amino acid sequence of SEQ ID NO: 19.

[0436] In other embodiments, the L2 comprises the amino acid sequence of SEQ ID NO: 20.

[0437] In other embodiments, the L2 comprises the amino acid sequence of SEQ ID NO: 21.

[0438] In other embodiments, the L2 comprises the amino acid sequence of SEQ ID NO: 22.

[0439] In other embodiments, the L2 comprises the amino acid sequence of SEQ ID NO: 23.

[0440] In other embodiments, the L2 comprises the amino acid sequence of SEQ ID NO: 24.

[0441] In other embodiments, the L2 comprises the amino acid sequence of SEQ ID NO: 25.

[0442] In other embodiments, the L2 comprises the amino acid sequence of SEQ ID NO: 26.

[0443] In other embodiments, the L2 comprises the amino acid sequence of SEQ ID NO: 27.

[0444] In other embodiments, the L2 comprises the amino acid sequence of SEQ ID NO: 28.

[0445] In other embodiments, the L2 comprises the amino acid sequence of SEQ ID NO: 29.

[0446] In other embodiments, the L2 comprises the amino acid sequence of SEQ ID NO: 30.

[0447] In other embodiments, the L2 comprises the amino acid sequence of SEQ ID NO: 31.

[0448] In other embodiments, the L2 comprises the amino acid sequence of SEQ ID NO: 32.

[0449] In other embodiments, the L2 comprises the amino acid sequence of SEQ ID NO: 33.

[0450] In other embodiments, the L2 comprises the amino acid sequence of SEQ ID NO: 34.

[0451] In other embodiments, the L2 comprises the amino acid sequence of SEQ ID NO: 35.

[0452] In other embodiments, the L2 comprises the amino acid sequence of SEQ ID NO: 36.

[0453] The antigen binding domains that bind CD3ε of the disclosure conjugated to Ig constant region or the fragment of the Ig constant region may be assessed for their functionality using several known assays. Binding to CD3ε may be assessed using methods described herein. Altered properties imparted by the Ig constant domain or the fragment of the Ig constant region such as Fc region may be assayed in Fc receptor binding assays using soluble forms of the receptors, such as the FcγRI, FcγRII, FcγRIII or FcRn receptors, or using cell-based assays measuring for example ADCC, CDC or ADCP.

[0454] ADCC may be assessed using an in vitro assay using CD3ε expressing cells as target cells and NK cells as effector cells. Cytolysis may be detected by the release of label (e.g. radioactive substrates, fluorescent dyes or natural intracellular proteins) from the lysed cells. In an exemplary assay, target cells are used with a ratio of 1 target cell to 4 effector cells. Target cells are pre-labeled with BATDA and combined with effector cells and the test antibody. The samples are incubated for 2 hours and cell lysis measured by measuring released BATDA into the supernatant. Data is normalized to maximal cytotoxicity with 0.67% Triton X-100 (Sigma Aldrich) and minimal control determined by spontaneous release of BATDA from target cells in the absence of any antibody.

[0455] ADCP may be evaluated by using monocyte-derived macrophages as effector cells and any CD3ε expressing cells as target cells which are engineered to express GFP or other labeled molecule. In an exemplary assay, effector:target cell ratio may be for example 4:1. Effector cells may be incubated with target cells for 4 hours with or without the antibody of the invention. After incubation, cells may be detached using accutase. Macrophages may be identified with anti-CD11b and anti-CD14 antibodies coupled to a fluorescent label, and percent phagocytosis may be determined based on % GFP fluorescence in the CD11⁺CD14⁺ macrophages using standard methods.

[0456] CDC of cells may be measured for example by plating Daudi cells at 1×10⁵ cells/well (50 μL/well) in RPMI-B (RPMI supplemented with 1% BSA), adding 50 μL of test protein to the wells at final concentration between 0-100 μg/mL, incubating the reaction for 15 min at room temperature, adding 11 μL of pooled human serum to the wells, and incubation the reaction for 45 min at 37° C. Percentage (%) lysed cells may be detected as % propidium iodide stained cells in FACS assay using standard methods.

Proteins Comprising the Antigen Binding Domains that Bind CD3ε of the Disclosure

[0457] The antigen binding domains that bind CD3ε of the disclosure may be engineered into monospecific or multispecific proteins of various designs using standard methods.

[0458] The disclosure also provides a monospecific protein comprising the antigen binding domain that binds CD3ε of the disclosure.

[0459] In other embodiments, the monospecific protein is an antibody.

[0460] The disclosure also provides a multispecific protein comprising the antigen binding domain that binds CD3ε of the disclosure.

[0461] In other embodiments, the multispecific protein is bispecific.

[0462] In other embodiments, the multispecific protein is trispecific.

[0463] In other embodiments, the multispecific protein is tetraspecific.

[0464] In other embodiments, the multispecific protein is monovalent for binding to CD3ε.

[0465] In other embodiments, the multispecific protein is bivalent for binding to CD3ε.

[0466] The disclosure also provides an isolated multispecific protein comprising a first antigen binding domain that binds CD3ε and a second antigen binding domain that binds a tumor antigen. In other embodiments, the tumor antigen is a protein or a fragment thereof that is present on a cancer cell or specific to a cancer cell.

[0467] In other embodiments, the tumor antigen is a BCMA antigen. In other embodiments, the tumor antigen is a PSMA antigen. In other embodiments, the tumor antigen is a CD79b antigen. In other embodiments, the tumor antigen is a CD20 antigen. In other embodiments, the tumor antigen is a CD20 antigen and a CD79b antigen.

[0468] In other embodiments, the first antigen binding domain that binds CD3ε and/or the second antigen binding domain that binds the tumor antigen comprise a scFv, a (scFv)₂, a Fv, a Fab, a F(ab′)₂, a Fd, a dAb or a WM.

[0469] In other embodiments, the first antigen binding domain that binds CD3ε and/or the second antigen binding domain that binds the tumor antigen comprise the Fab.

[0470] In other embodiments, the first antigen binding domain that binds CD3ε and/or the second antigen binding domain that binds the tumor antigen comprise the F(ab′)2.

[0471] In other embodiments, the first antigen binding domain that binds CD3ε and/or the second antigen binding domain that binds the tumor antigen comprise the VHH.

[0472] In other embodiments, the first antigen binding domain that binds CD3ε and/or the second antigen binding domain that binds the tumor antigen comprise the Fv.

[0473] In other embodiments, the first antigen binding domain that binds CD3ε and/or the second antigen binding domain that binds the tumor antigen comprise the Fd.

[0474] In other embodiments, the first antigen binding domain that binds CD3ε and/or the second antigen binding domain that binds the tumor antigen comprise the scFv.

[0475] In other embodiments, the scFv comprises, from the N- to C-terminus, a VH, a first linker (L1) and a VL (VH-L1-VL) or the VL, the L1 and the VH (VL-L1-VH).

[0476] In other embodiments, the L1 comprises about 5-50 amino acids.

[0477] In other embodiments, the L1 comprises about 5-40 amino acids.

[0478] In other embodiments, the L1 comprises about 10-30 amino acids.

[0479] In other embodiments, the L1 comprises about 10-20 amino acids.

[0480] In other embodiments, the L1 comprises the amino acid sequence of 3, 4, 5, 6, 7, 8, 9, 10, 11, 12, 13, 14, 15, 16, 17, 18, 19, 20, 21, 22, 23, 24, 25, 26, 27, 28, 29, 30, 31, 32, 33, 34, 35 or 36.

[0481] In other embodiments, the L1 comprises the amino acid sequence of SEQ ID NO: 3.

[0482] In other embodiments, the L1 comprises the amino acid sequence of SEQ ID NO: 4.

[0483] In other embodiments, the L1 comprises the amino acid sequence of SEQ ID NO: 5.

[0484] In other embodiments, the L1 comprises the amino acid sequence of SEQ ID NO: 6.

[0485] In other embodiments, the L1 comprises the amino acid sequence of SEQ ID NO: 7.

[0486] In other embodiments, the L1 comprises the amino acid sequence of SEQ ID NO: 8.

[0487] In other embodiments, the L1 comprises the amino acid sequence of SEQ ID NO: 9.

[0488] In other embodiments, the L1 comprises the amino acid sequence of SEQ ID NO: 10.

[0489] In other embodiments, the L1 comprises the amino acid sequence of SEQ ID NO: 11.

[0490] In other embodiments, the L1 comprises the amino acid sequence of SEQ ID NO: 12.

[0491] In other embodiments, the L1 comprises the amino acid sequence of SEQ ID NO: 13.

[0492] In other embodiments, the L1 comprises the amino acid sequence of SEQ ID NO: 14.

[0493] In other embodiments, the L1 comprises the amino acid sequence of SEQ ID NO: 15.

[0494] In other embodiments, the L1 comprises the amino acid sequence of SEQ ID NO: 16.

[0495] In other embodiments, the L1 comprises the amino acid sequence of SEQ ID NO: 17.

[0496] In other embodiments, the L1 comprises the amino acid sequence of SEQ ID NO: 17.

[0497] In other embodiments, the L1 comprises the amino acid sequence of SEQ ID NO: 19.

[0498] In other embodiments, the L1 comprises the amino acid sequence of SEQ ID NO: 20.

[0499] In other embodiments, the L1 comprises the amino acid sequence of SEQ ID NO: 21.

[0500] In other embodiments, the L1 comprises the amino acid sequence of SEQ ID NO: 22.

[0501] In other embodiments, the L1 comprises the amino acid sequence of SEQ ID NO: 23.

[0502] In other embodiments, the L1 comprises the amino acid sequence of SEQ ID NO: 24.

[0503] In other embodiments, the L1 comprises the amino acid sequence of SEQ ID NO: 25.

[0504] In other embodiments, the L1 comprises the amino acid sequence of SEQ ID NO: 26.

[0505] In other embodiments, the L1 comprises the amino acid sequence of SEQ ID NO: 27.

[0506] In other embodiments, the L1 comprises the amino acid sequence of SEQ ID NO: 28.

[0507] In other embodiments, the L1 comprises the amino acid sequence of SEQ ID NO: 29.

[0508] In other embodiments, the L1 comprises the amino acid sequence of SEQ ID NO: 30.

[0509] In other embodiments, the L1 comprises the amino acid sequence of SEQ ID NO: 31.

[0510] In other embodiments, the L1 comprises the amino acid sequence of SEQ ID NO: 32.

[0511] In other embodiments, the L1 comprises the amino acid sequence of SEQ ID NO: 33.

[0512] In other embodiments, the L1 comprises the amino acid sequence of SEQ ID NO: 34.

[0513] In other embodiments, the L1 comprises the amino acid sequence of SEQ ID NO: 35.

[0514] In other embodiments, the L1 comprises the amino acid sequence of SEQ ID NO: 36.

[0515] In other embodiments, the first antigen binding domain that binds CD3ε comprises the HCDR1 of SEQ ID NO: 70, the HCDR2 of SEQ ID NO: 71, the HCDR3 of SEQ ID NOs: 72, 87, 90, or 86, the LCDR1 of SEQ ID NO: 79, the LCDR2 of SEQ ID NO: 80, and the LCDR3 of SEQ ID NOs: 81.

[0516] In other embodiments, the first antigen binding domain that binds CD3ε comprises the HCDR1, the HCDR2, the HCDR3, the LCDR1, the LCDR2 and the LCDR3 of SEQ ID NOs: 70, 71, 86, 79, 80, and 81, respectively.

[0517] In other embodiments, the first antigen binding domain that binds CD3ε comprises the HCDR1, the HCDR2, the HCDR3, the LCDR1, the LCDR2 and the LCDR3 of
[0518] SEQ ID NOs: 70, 71, 72, 79, 80, and 81, respectively;
[0519] SEQ ID NOs: 70, 71, 87, 79, 80, and 81, respectively; or
[0520] SEQ ID NOs: 70, 71, 90, 79, 80, and 81, respectively.

[0521] In other embodiments, the first antigen binding domain that binds CD3ε comprises the VH of SEQ ID NO: 55 and the VL of SEQ ID NO: 59.

[0522] In other embodiments, the first antigen binding domain that binds CD3ε comprises the VH of SEQ ID NO: 55 and the VL of SEQ ID NO: 58.

[0523] In other embodiments, the first antigen binding domain that binds CD3ε comprises the VH of SEQ ID NO: 54 and the VL of SEQ ID NO: 56.

[0524] In other embodiments, the first antigen binding domain that binds CD3ε comprises the VH of SEQ ID NO: 48 and the VL of SEQ ID NO: 58.

[0525] In other embodiments, the first antigen binding domain that binds CD3ε comprises the VH of SEQ ID NO: 88 and the VL of SEQ ID NO: 58.

[0526] In other embodiments, the first antigen binding domain that binds CD3ε comprises the VH of SEQ ID NO: 242 and the VL of SEQ ID NO: 58.

[0527] In other embodiments, the first antigen binding domain that binds CD3ε comprises the VH of SEQ ID NOs: 55, 54, or 48 and the VL of SEQ ID NOs: 59, 58, or 56.

[0528] In other embodiments, the first antigen binding domain that binds CD3ε comprises the amino acid sequence of SEQ ID Nos: 96, 97, 98, 99, 100, 101, 102, 103, 104, 105, 106, 107, 108, 109, 110, 111, 112, 113, 114, 115, 116, 117, 118, 119, 120, 121, 122, 123, 124, 125, or 126.

[0529] In other embodiments, the first antigen binding domain that binds CD3ε comprises the amino acid sequence of SEQ ID NO: 96.

[0530] In other embodiments, the first antigen binding domain that binds CD3ε comprises the amino acid sequence of SEQ ID NO: 97.

[0531] In other embodiments, the first antigen binding domain that binds CD3ε comprises the amino acid sequence of SEQ ID NO: 98.

[0532] In other embodiments, the first antigen binding domain that binds CD3ε comprises the amino acid sequence of SEQ ID NO: 99.

[0533] In other embodiments, the first antigen binding domain that binds CD3ε comprises the amino acid sequence of SEQ ID NO: 100.

[0534] In other embodiments, the first antigen binding domain that binds CD3ε comprises the amino acid sequence of SEQ ID NO: 101.

[0535] In other embodiments, the first antigen binding domain that binds CD3ε comprises the amino acid sequence of SEQ ID NO: 102.

[0536] In other embodiments, the first antigen binding domain that binds CD3ε comprises the amino acid sequence of SEQ ID NO: 103.

[0537] In other embodiments, the first antigen binding domain that binds CD3ε comprises the amino acid sequence of SEQ ID NO: 104.

[0538] In other embodiments, the first antigen binding domain that binds CD3ε comprises the amino acid sequence of SEQ ID NO: 105.

[0539] In other embodiments, the first antigen binding domain that binds CD3ε comprises the amino acid sequence of SEQ ID NO: 106.

[0540] In other embodiments, the first antigen binding domain that binds CD3ε comprises the amino acid sequence of SEQ ID NO: 107.

[0541] In other embodiments, the first antigen binding domain that binds CD3ε comprises the amino acid sequence of SEQ ID NO: 108.

[0542] In other embodiments, the first antigen binding domain that binds CD3ε comprises the amino acid sequence of SEQ ID NO: 109.

[0543] In other embodiments, the first antigen binding domain that binds CD3ε comprises the amino acid sequence of SEQ ID NO: 110.

[0544] In other embodiments, the first antigen binding domain that binds CD3ε comprises the amino acid sequence of SEQ ID NO: 112.

[0545] In other embodiments, the first antigen binding domain that binds CD3ε comprises the amino acid sequence of SEQ ID NO: 113.

[0546] In other embodiments, the first antigen binding domain that binds CD3ε comprises the amino acid sequence of SEQ ID NO: 114.

[0547] In other embodiments, the first antigen binding domain that binds CD3ε comprises the amino acid sequence of SEQ ID NO: 115.

[0548] In other embodiments, the first antigen binding domain that binds CD3ε comprises the amino acid sequence of SEQ ID NO: 116.

[0549] In other embodiments, the first antigen binding domain that binds CD3ε comprises the amino acid sequence of SEQ ID NO: 117.

[0550] In other embodiments, the first antigen binding domain that binds CD3ε comprises the amino acid sequence of SEQ ID NO: 118.

[0551] In other embodiments, the first antigen binding domain that binds CD3ε comprises the amino acid sequence of SEQ ID NO: 119.

[0552] In other embodiments, the first antigen binding domain that binds CD3ε comprises the amino acid sequence of SEQ ID NO: 120.

[0553] In other embodiments, the first antigen binding domain that binds CD3ε comprises the amino acid sequence of SEQ ID NO: 121.

[0554] In other embodiments, the first antigen binding domain that binds CD3ε comprises the amino acid sequence of SEQ ID NO: 122.

[0555] In other embodiments, the first antigen binding domain that binds CD3ε comprises the amino acid sequence of SEQ ID NO: 123.

[0556] In other embodiments, the first antigen binding domain that binds CD3ε comprises the amino acid sequence of SEQ ID NO: 124.

[0557] In other embodiments, the first antigen binding domain that binds CD3ε comprises the amino acid sequence of SEQ ID NO: 125.

[0558] In other embodiments, the first antigen binding domain that binds CD3ε comprises the amino acid sequence of SEQ ID NO: 126.

[0559] In other embodiments, the second antigen binding domain that binds a tumor antigen is specific to PSMA.

[0560] In other embodiments, the second antigen binding domain that binds a tumor antigen comprises the HC of SEQ ID NO: 1242 and the LC of SEQ ID NO: 1243.

[0561] In other embodiments, the second antigen binding domain that binds a tumor antigen comprises the HC of SEQ ID NO: 1244 and the LC of SEQ ID NO: 1245.

[0562] In other embodiments, the second antigen binding domain that binds a tumor antigen comprises the HC of SEQ ID NO: 1246 and the LC of SEQ ID NO: 1247.

[0563] In other embodiments, the second antigen binding domain that binds a tumor antigen comprises the HC of SEQ ID NO: 1248.

[0564] In other embodiments, the second antigen binding domain that binds a tumor antigen comprises the HC of SEQ ID NO: 1250.

[0565] In other embodiments, the second antigen binding domain that binds a tumor antigen comprises the HC of SEQ ID NO: 1252.

[0566] In other embodiments, the second antigen binding domain that binds a tumor antigen comprises the HC of SEQ ID NO: 1254.

[0567] In other embodiments, the second antigen binding domain that binds a tumor antigen comprises the HC of SEQ ID NO: 1256.

[0568] In other embodiments, the second antigen binding domain that binds a tumor antigen comprises the HC of SEQ ID NO: 1258.

[0569] In other embodiments, the second antigen binding domain that binds a tumor antigen comprises the HC of SEQ ID NO: 1260.

[0570] In other embodiments, the second antigen binding domain that binds a tumor antigen comprises the HC of SEQ ID NO: 1262.

[0571] In other embodiments, the second antigen binding domain that binds a tumor antigen comprises the HC of SEQ ID NO: 1264.

[0572] In other embodiments, the second antigen binding domain that binds a tumor antigen comprises the HC of SEQ ID NO: 1266.

[0573] In other embodiments, the second antigen binding domain that binds a tumor antigen comprises the HC of SEQ ID NO: 1268.

[0574] In other embodiments, the second antigen binding domain that binds a tumor antigen comprises the HC of SEQ ID NO: 1270.

[0575] In other embodiments, the second antigen binding domain that binds a tumor antigen comprises the HC of SEQ ID NO: 1272.

[0576] In other embodiments, the second antigen binding domain that binds a tumor antigen comprises the HC of SEQ ID NO: 1274.

[0577] In other embodiments, the second antigen binding domain that binds a tumor antigen comprises the HC of SEQ ID NO: 1276.

[0578] In other embodiments, the second antigen binding domain that binds a tumor antigen comprises the HC of SEQ ID NO: 1278.

[0579] In other embodiments, the second antigen binding domain that binds a tumor antigen comprises the HC of SEQ ID NO: 1280.

[0580] In other embodiments, the second antigen binding domain that binds a tumor antigen comprises the HC of SEQ ID NO: 1282.

[0581] In other embodiments, the second antigen binding domain that binds a tumor antigen comprises the HC of SEQ ID NO: 1284.

[0582] In other embodiments, the second antigen binding domain that binds a tumor antigen comprises the HC of SEQ ID NO: 1286.

[0583] In other embodiments, the second antigen binding domain that binds a tumor antigen comprises the HC of SEQ ID NO: 1288.

[0584] In other embodiments, the second antigen binding domain that binds a tumor antigen comprises the HC of SEQ ID NO: 1290.

[0585] In other embodiments, the second antigen binding domain that binds a tumor antigen comprises the HC of SEQ ID NO: 1292.

[0586] In other embodiments, the second antigen binding domain that binds a tumor antigen comprises the HC of SEQ ID NO: 1294.

[0587] In other embodiments, the second antigen binding domain that binds a tumor antigen comprises the HC of SEQ ID NO: 1459 and the LC of SEQ ID NO: 1460.

[0588] In other embodiments, the second antigen binding domain that binds a tumor antigen comprises the HC of SEQ ID NO: 1461 and the LC of SEQ ID NO: 1462.

[0589] In other embodiments, the second antigen binding domain that binds a tumor antigen comprises the HC of SEQ ID NO: 1356 and the LC of SEQ ID NO: 1357.

[0590] In other embodiments, the second antigen binding domain that binds a tumor antigen comprises the HC of SEQ ID NO: 1358 and the LC of SEQ ID NO: 1359.

[0591] In other embodiments, the second antigen binding domain that binds a tumor antigen comprises the HC of SEQ ID NO: 1360 and the LC of SEQ ID NO: 1361.

[0592] In other embodiments, the second antigen binding domain that binds a tumor antigen comprises the HC of SEQ ID NO: 1362 and the LC of SEQ ID NO: 1363.

[0593] In other embodiments, the second antigen binding domain that binds a tumor antigen comprises the HC of SEQ ID NO: 1364 and the LC of SEQ ID NO: 1365.

[0594] In other embodiments, the second antigen binding domain that binds a tumor antigen comprises the HC of SEQ ID NO: 1366 and the LC of SEQ ID NO: 1367.

[0595] In other embodiments, the second antigen binding domain that binds a tumor antigen comprises the HC of SEQ ID NO: 1368 and the LC of SEQ ID NO: 1369.

[0596] In other embodiments, the second antigen binding domain that binds a tumor antigen comprises the HC of SEQ ID NO: 1370 and the LC of SEQ ID NO: 1371.

[0597] In other embodiments, the second antigen binding domain that binds a tumor antigen comprises the HC of SEQ ID NO: 1372 and the LC of SEQ ID NO: 1373.

[0598] In other embodiments, the second antigen binding domain that binds a tumor antigen comprises the HC of SEQ ID NO: 1374 and the LC of SEQ ID NO: 1375.

[0599] In other embodiments, the second antigen binding domain that binds a tumor antigen comprises the HC of SEQ ID NO: 1376 and the LC of SEQ ID NO: 1377.

[0600] In other embodiments, the second antigen binding domain that binds a tumor antigen comprises the HC of SEQ ID NO: 1378 and the LC of SEQ ID NO: 1379.

[0601] In other embodiments, the second antigen binding domain that binds a tumor antigen comprises the HC of SEQ ID NO: 1378 and the LC of SEQ ID NO: 1379.

[0602] In other embodiments, the second antigen binding domain that binds a tumor antigen comprises the HC of SEQ ID NO: 1380 and the LC of SEQ ID NO: 1381.

[0603] In other embodiments, the second antigen binding domain that binds a tumor antigen comprises the HC of SEQ ID NO: 1382 and the LC of SEQ ID NO: 1383.

[0604] In other embodiments, the second antigen binding domain that binds a tumor antigen comprises the HC of SEQ ID NO: 1384 and the LC of SEQ ID NO: 1385.

[0605] In other embodiments, the second antigen binding domain that binds a tumor antigen comprises the HC of SEQ ID NO: 1386 and the LC of SEQ ID NO: 1387.

[0606] In other embodiments, the second antigen binding domain that binds a tumor antigen comprises the HC of SEQ ID NO: 1388 and the LC of SEQ ID NO: 1389.

[0607] In other embodiments, the second antigen binding domain that binds a tumor antigen comprises the HC of SEQ ID NO: 1390 and the LC of SEQ ID NO: 1391.

[0608] In other embodiments, the second antigen binding domain that binds a tumor antigen comprises the HC of SEQ ID NO: 1392 and the LC of SEQ ID NO: 1393.

[0609] In other embodiments, the second antigen binding domain that binds a tumor antigen comprises the HC of SEQ ID NO: 1394 and the LC of SEQ ID NO: 1395.

[0610] In other embodiments, the second antigen binding domain that binds a tumor antigen comprises the HC of SEQ ID NO: 1396 and the LC of SEQ ID NO: 1397.

[0611] In other embodiments, the second antigen binding domain that binds a tumor antigen comprises the HC of SEQ ID NO: 1396 and the LC of SEQ ID NO: 1397.

[0612] In other embodiments, the second antigen binding domain that binds a tumor antigen comprises the HC of SEQ ID NO: 1396 and the LC of SEQ ID NO: 1397.

[0613] In other embodiments, the second antigen binding domain that binds a tumor antigen comprises the HC of SEQ ID NO: 1396 and the LC of SEQ ID NO: 1397.

[0614] In other embodiments, the second antigen binding domain that binds a tumor antigen comprises the HC of SEQ ID NO: 1398 and the LC of SEQ ID NO: 1399.

[0615] In other embodiments, the second antigen binding domain that binds a tumor antigen comprises the HC of SEQ ID NO: 1400 and the LC of SEQ ID NO: 1401.

[0616] In other embodiments, the second antigen binding domain that binds a tumor antigen comprises the HC of SEQ ID NO: 1402 and the LC of SEQ ID NO: 1403.

[0617] In other embodiments, the second antigen binding domain that binds a tumor antigen comprises the HC of SEQ ID NO: 1404 and the LC of SEQ ID NO: 1405.

[0618] In other embodiments, the second antigen binding domain that binds a tumor antigen comprises the HC of SEQ ID NO: 1406 and the LC of SEQ ID NO: 1407.

[0619] In other embodiments, the second antigen binding domain that binds a tumor antigen comprises the HC of SEQ ID NO: 1408 and the LC of SEQ ID NO: 1409.

[0620] In other embodiments, the second antigen binding domain that binds a tumor antigen comprises the HC of SEQ ID NO: 1410 and the LC of SEQ ID NO: 1411.

[0621] In other embodiments, the second antigen binding domain that binds a tumor antigen comprises the HC of SEQ ID NO: 1412 and the LC of SEQ ID NO: 1413.

[0622] In other embodiments, the second antigen binding domain that binds a tumor antigen comprises the HC of SEQ ID NO: 1414 and the LC of SEQ ID NO: 1415.

[0623] In other embodiments, the second antigen binding domain that binds a tumor antigen is specific to CD79b.

[0624] In other embodiments, the second antigen binding domain that binds a tumor antigen comprises the HC of SEQ ID NO: 1489 and the LC of SEQ ID NO: 1491.

[0625] In other embodiments, the second antigen binding domain that binds a tumor antigen comprises the HC of SEQ ID NO: 1493 and the LC of SEQ ID NO: 1495.

[0626] In other embodiments, the second antigen binding domain that binds a tumor antigen comprises the HC of SEQ ID NO: 1497 and the LC of SEQ ID NO: 1499.

[0627] In other embodiments, the second antigen binding domain that binds a tumor antigen comprises the HC of SEQ ID NO: 1502 and the LC of SEQ ID NO: 1499.

[0628] In other embodiments, the second antigen binding domain that binds a tumor antigen comprises the HC of SEQ ID NO: 1489 and the LC of SEQ ID NO: 1491.

[0629] In other embodiments, the first antigen binding domain that binds CD3ε is conjugated to a first immunoglobulin (Ig) constant region or a fragment of the first Ig constant region and/or the second antigen binding domain that binds the tumor antigen is conjugated to a second immunoglobulin (Ig) constant region or a fragment of the second Ig constant region.

[0630] In other embodiments, the fragment of the first Ig constant region and/or the fragment of the second Ig constant region comprises a Fc region.

[0631] In other embodiments, the fragment of the first Ig constant region and/or the fragment of the second Ig constant region comprises a CH2 domain.

[0632] In other embodiments, the fragment of the first Ig constant region and/or the fragment of the second Ig constant region comprises a CH3 domain.

[0633] In other embodiments, the fragment of the first Ig constant region and/or the fragment of the second Ig constant region comprises the CH2 domain and the CH3 domain.

[0634] In other embodiments, the fragment of the first Ig constant region and/or the fragment of the second Ig constant region comprises at least portion of a hinge, the CH2 domain and the CH3 domain.

[0635] In other embodiments, the fragment of the Ig constant region comprises the hinge, the CH2 domain and the CH3 domain.

[0636] In other embodiments, the multispecific protein further comprises a second linker (L2) between the first antigen binding domain that binds CD3ε and the first Ig constant region or the fragment of the first Ig constant region and the second antigen binding domain that binds the tumor antigen and the second Ig constant region or the fragment of the second Ig constant region.

[0637] In other embodiments, the L2 comprises the amino acid sequence of SEQ ID NOs: 3, 4, 5, 6, 7, 8, 9, 10, 11, 12, 13, 14, 15, 16, 17, 18, 19, 20, 21, 22, 23, 24, 25, 26, 27, 28, 29, 30, 31, 32, 33, 34, 35 or 36.

[0638] In other embodiments, the first Ig constant region or the fragment of the first Ig constant region and the second Ig constant region or the fragment of the second Ig constant region is an IgG1, an IgG2, and IgG3 or an IgG4 isotype.

[0639] In other embodiments, the first Ig constant region or the fragment of the first Ig constant region and the second Ig constant region or the fragment of the second Ig constant region is an IgG1 isotype.

[0640] In other embodiments, the first Ig constant region or the fragment of the first Ig constant region and the second Ig constant region or the fragment of the second Ig constant region is an IgG2 isotype.

[0641] In other embodiments, the first Ig constant region or the fragment of the first Ig constant region and the second Ig constant region or the fragment of the second Ig constant region is an IgG3 isotype.

[0642] In other embodiments, the first Ig constant region or the fragment of the first Ig constant region and the second Ig constant region or the fragment of the second Ig constant region is an IgG4 isotype.

[0643] The first Ig constant region or the fragment of the first Ig constant region and the second Ig constant region or the fragment of the second Ig constant region can further be engineered as described herein.

[0644] In other embodiments, the first Ig constant region or the fragment of the first Ig constant region and the second Ig constant region or the fragment of the second Ig constant region comprises at least one mutation that results in reduced binding of the multispecific protein to a FcγR.

[0645] In other embodiments, the at least one mutation that results in reduced binding of the multispecific protein to the FcγR is selected from the group consisting of F234A/L235A, L234A/L235A, L234A/L235A/D265S, V234A/G237A/P238S/H268A/V309L/A330S/P331S, F234A/L235A, S228P/F234A/L235A, N297A, V234A/G237A, K214T/E233P/L234V/L235A/G236-deleted/A327G/P331A/D365E/L358M, H268Q/V309L/A330S/P331S, S267E/L328F, L234F/L235E/D265A, L234A/L235A/G237A/P238S/H268A/A330S/P331S, S228P/F234A/L235A/G237A/P238S and S228P/F234A/L235A/G236-deleted/G237A/P238S, wherein residue numbering is according to the EU index.

[0646] In other embodiments, the first Ig constant region or the fragment of the first Ig constant region and the second Ig constant region or the fragment of the second Ig constant region comprises at least one mutation that results in enhanced binding of the multispecific protein to a Fcγ receptor (FcγR).

[0647] In other embodiments, the at least one mutation that results in enhanced binding of the multispecific protein to the FcγR is selected from the group consisting of S239D/I332E, S298A/E333A/K334A, F243L/R292P/Y300L, F243L/R292P/Y300L/P396L, F243L/R292P/Y300L/V305I/P396L and G236A/S239D/I332E, wherein residue numbering is according to the EU index.

[0648] In other embodiments, the FcγR is FcγRI, FcγRIIA, FcγRIIB or FcγRIII, or any combination thereof.

[0649] In other embodiments, the first Ig constant region or the fragment of the first Ig constant region and the second Ig constant region or the fragment of the second Ig constant region comprises at least one mutation that modulates a half-life of the multispecific protein.

[0650] In other embodiments, the at least one mutation that modulates the half-life of the multispecific protein is selected from the group consisting of H435A, P257I/N434H, D376V/N434H, M252Y/S254T/T256E/H433K/N434F, T308P/N434A and H435R, wherein residue numbering is according to the EU index.

[0651] In other embodiments, the multispecific protein comprises at least one mutation in a CH3 domain of the first Ig constant region or in a CH3 domain of the fragment of the first Ig constant region and/or at least one mutation in a CH3 domain of the second Ig constant region or in a CH3 domain of the fragment of the second Ig constant region.

[0652] In other embodiments, the at least one mutation in a CH3 domain of the first Ig constant region or in a CH3 domain of the fragment of the first Ig constant region and/or at least one mutation in a CH3 domain of the second Ig constant region or in a CH3 domain of the fragment of the second Ig constant region is selected from the group consisting of T350V, L351Y, F405A, Y407V, T366Y, T366W, T366L, T366L, F405W, T394W, K392L, T394S, T394W, Y407T, Y407A, T366S/L368A/Y407V, L351Y/F405A/Y407V, T366I/K392M/T394W, F405A/Y407V, T366L/K392M/T394W, T366L/K392L/T394W, L351Y/Y407A, L351Y/Y407V, T366A/K409F, T366V/K409F, T366A/K409F, T350V/L351Y/F405A/Y407V and T350V/T366L/K392L/T394W, wherein residue numbering is according to the EU index.

[0653] In other embodiments, the first Ig constant region or the fragment of the first Ig constant region and the second Ig constant region or the fragment of the second Ig constant region comprise the following mutations

[0654] L235A_L235A_D265S_T350V_L351Y_F405A_Y407V in the first Ig constant region and L235A_L235A_D265S_T350V_T366L_K392L_T394W in the second Ig constant region; or

[0655] L235A_L235A_D265S_T350V_T366L_K392L_T394W in the first Ig constant region and L235A_L235A_D265S_T350V_L351Y_F405A_Y407V in the second Ig constant region.

### Trispecific Antibodies

[0656] In some embodiments, provided herein are trispecific antibodies that bind to CD79b, CD20, and CD3, and trispecific binding fragments thereof. This can be achieved by, for example, making a molecule which comprises a first region binding specifically to CD79b, a second binding region binding specifically to CD3 and a third binding region binding specifically to the CD20. The antigen-binding regions can take any form that allows specific recognition of the target, for example the binding region may be or may include a heavy chain variable domain, an Fv (combination of a heavy chain variable domain and a light chain variable domain), an single-chain Fv (scFv), an Fab, a binding domain based on a fibronectin type III domain (such as from fibronectin, or based on a consensus of the type III domains from fibronectin, or from tenascin or based on a consensus of the type III domains from tenascin, such as the Centyrin molecules from Janssen Biotech, Inc., see e.g. WO2010/051274 and WO2010/093627). Accordingly, trispecific molecules comprising three different antigen-binding regions which bind CD79b, CD20, and CD3, respectively, are provided.

[0657] In some embodiments, the CD79b×CD20×CD3-multispecific antibody comprises a first heavy chain (HC1) and a light chain (LC) that pair to form a first antigen-binding site that specifically binds a first antigen and a second heavy chain (HC2) comprises a second antigen-binding site that specifically binds a second antigen. Either the HC1 or the HC2 may further comprise a third antigen-binding site that specifically binds a third antigen. The HC1 and HC2 may each comprise a Fragment crystallizable (Fc) domain comprising a CH2-CH3 domain. In preferred embodiments, the CD79b×CD20×CD3-multispecific antibody is a trispecific antibody comprising a CD79b-specific arm comprising a first heavy chain (HC1) and a light chain (LC) that pair to form a first antigen-binding site that specifically binds CD79b, a second heavy chain (HC2) that comprises a second antigen-binding site that specifically binds a second antigen, and the HC1 or the HC2 further comprises a third antigen-binding site that specifically binds a third antigen. In some embodiments, the second antigen is CD20, and the third antigen is CD3. In some embodiments, the second antigen is CD3, and the third antigen is CD20.

[0658] In some embodiment, the HC2 comprises the third antigen-binding site that specifically binds the third antigen. For example, the HC2 may comprise, from N to C-terminus, the second antigen-binding site, the Fc domain, a linker, and the third antigen-binding site.

[0659] In some embodiment, the HC1 comprises the third antigen-binding site that specifically binds the third antigen. For example, the HC1 may comprise, from N to C-terminus, a heavy chain variable domain (VH) associated with the first antigen-binding site, a CH1 domain, the Fc domain, a linker, and the third antigen-binding site.

[0660] In one embodiment, the CD79b×CD20×CD3-multispecific antibody is a trispecific antibody comprising a CD79b-specific arm comprising an HC1 and a LC that pair to form a first antigen-binding site that specifically binds CD79b, an HC2 that comprises a second antigen-binding site that specifically binds CD3, and the HC2 further comprises a third antigen-binding site that specifically binds CD20.

[0661] In one embodiment, the CD79b×CD20×CD3-multispecific antibody is a trispecific antibody comprising a CD79b-specific arm comprising an HC1 and a LC that pair to form a first antigen-binding site that specifically binds CD79b, an HC2 that comprises a second antigen-binding site that specifically binds CD20, and the HC2 further comprises a third antigen-binding site that specifically binds CD3.

[0662] In one embodiment, the CD79b×CD20×CD3-multispecific antibody is a trispecific antibody comprising a CD79b-specific arm comprising an HC1 and a LC that pair to form a first antigen-binding site that specifically binds CD79b, an HC2 that comprises a second antigen-binding site that specifically binds CD20, and the HC1 further comprises a third antigen-binding site that specifically binds CD3.

[0663] In some embodiments, the first antigen-binding site comprises an antigen-binding fragment (Fab). In some embodiments, the second antigen-binding site comprises a single-chain variable fragment (scFv). In some embodiments, the third antigen-binding site comprises a single-chain variable fragment (scFv).

[0664] In one embodiment, the CD79b-binding arm comprises an antigen-binding fragment (Fab), the CD3-binding arm comprises a single-chain variable fragment (scFv), and the CD20-binding arm comprises a single-chain variable fragment (scFv).

[0665] Exemplary heavy chains and light chains for the exemplary tri-specific binding proteins of the disclosure are shown in Table 31.

Generation of Multispecific Proteins that Comprise Antigen Binding Fragments that Bind CD3ε.

[0666] The antigen binding fragments that bind CD3ε of the disclosure may be engineered into multispecific antibodies which are also encompassed within the scope of the invention.

[0667] The antigen binding fragments that bind CD3ε may be engineered into full length multispecific antibodies which are generated using Fab arm exchange, in which substitutions are introduced into two monospecific bivalent antibodies within the Ig constant region CH3 domain which promote Fab arm exchange in vitro. In the methods, two monospecific bivalent antibodies are engineered to have certain substitutions at the CH3 domain that promote heterodimer stability; the antibodies are incubated together under reducing conditions sufficient to allow the cysteines in the hinge region to undergo disulfide bond isomerization; thereby generating the bispecific antibody by Fab arm exchange. The incubation conditions may optimally be restored to non-reducing. Exemplary reducing agents that may be used are 2-mercaptoethylamine (2-MEA), dithiothreitol (DTT), dithioerythritol (DTE), glutathione, tris(2-carboxyethyl)phosphine (TCEP), L-cysteine and beta-mercaptoethanol, preferably a reducing agent selected from the group consisting of: 2-mercaptoethylamine, dithiothreitol and tris(2-carboxyethyl)phosphine. For example, incubation for at least 90 min at a temperature of at least 20° C. in the presence of at least 25 mM 2-MEA or in the presence of at least 0.5 mM dithiothreitol at a pH of from 5-8, for example at pH of 7.0 or at pH of 7.4 may be used.

[0668] CH3 mutations that may be used include technologies such as Knob-in-Hole mutations (Genentech), electrostatically-matched mutations (Chugai, Amgen, NovoNordisk, Oncomed), the Strand Exchange Engineered Domain body (SEEDbody) (EMD Serono), Duobody® mutations (Genmab), and other asymmetric mutations (e.g. Zymeworks).

[0669] Knob-in-hole mutations are disclosed for example in WO1996/027011 and include mutations on the interface of CH3 region in which an amino acid with a small side chain (hole) is introduced into the first CH3 region and an amino acid with a large side chain (knob) is introduced into the second CH3 region, resulting in preferential interaction between the first CH3 region and the second CH3 region. Exemplary CH3 region mutations forming a knob and a hole are T366Y/F405A, T366W/F405W, F405W/Y407A, T394W/Y407T, T394S/Y407A, T366W/T394S, F405W/T394S and 1366W/1366S_L368A_Y407V.

[0670] Heavy chain heterodimer formation may be promoted by using electrostatic interactions by substituting positively charged residues on the first CH3 region and negatively charged residues on the second CH3 region as described in US2010/0015133, US2009/0182127, US2010/028637 or US2011/0123532.

[0671] Other asymmetric mutations that can be used to promote heavy chain heterodimerization are L351Y_F405A_Y407V/T394W, T366I_K392M_T394W/F405A_Y407V, T366L_K392M_T394W/F405A_Y407V, L351Y_Y407A/T366A_K409F, L351Y_Y407A/T366V_K409F, Y407A/T366A_K409F, or T350V_L351Y_F405A_Y407V/T350V_T366L_K392L_T394W as described in US2012/0149876 or US2013/0195849 (Zymeworks).

[0672] SEEDbody mutations involve substituting select IgG residues with IgA residues to promote heavy chain heterodimerization as described in US20070287170.

[0673] Other exemplary mutations that may be used are R409D_K370E/D399K_E357K, S354C_T366W/Y349C_T366S_L368A_Y407V, Y349C_T366W/S354C_T366S_L368A_Y407V, T366K/L351D, L351K/Y349E, L351K/Y349D, L351K/L368E, L351Y_Y407A/T366A_K409F, L351Y_Y407A/T366V_K409F, K392D/D399K, K392D/E356K, K253E_D282K_K322D/D239K_E240K_K292D, K392D_K409D/D356K_D399K as described in WO2007/147901, WO 2011/143545, WO2013157954, WO2013096291 and US2018/0118849.

[0674] Duobody® mutations (Genmab) are disclosed for example in U.S. Pat. No. 9,150,663 and US2014/0303356 and include mutations F405L/K409R, wild-type/F405L_R409K, T350I_K370T_F405L/K409R, K370W/K409R, D399AFGHILMNRSTVWY/K409R, T366ADEFGHILMQVY/K409R, L368ADEGHNRSTVQ/K409AGRH, D399FHKRQ/K409AGRH, F405IKLSTVW/K409AGRH and Y407LWQ/K409AGRH.

[0675] Additional bispecific or multispecific structures into which the antigen binding domains that bind

[0676] CD3ε can be incorporated include Dual Variable Domain Immunoglobulins (DVD) (Int. Pat. Publ. No. WO2009/134776; DVDs are full length antibodies comprising the heavy chain having a structure VH1-linker-VH2-CH and the light chain having the structure VL1-linker-VL2-CL; linker being optional), structures that include various dimerization domains to connect the two antibody arms with different specificity, such as leucine zipper or collagen dimerization domains (Int. Pat. Publ. No. WO2012/022811, U.S. Pat. Nos. 5,932,448; 6,833,441), two or more domain antibodies (dAbs) conjugated together, diabodies, heavy chain only antibodies such as camelid antibodies and engineered camelid antibodies, Dual Targeting (DT)-Ig (GSK/Domantis), Two-in-one Antibody (Genentech), Cross-linked Mabs (Karmanos Cancer Center), mAb2 (F-Star) and CovX-body (CovX/Pfizer), IgG-like Bispecific (InnClone/Eli Lilly), Ts2Ab (MedImmune/AZ) and BsAb (Zymogenetics), HERCULES (Biogen Idec) and TvAb (Roche), ScFv/Fc Fusions (Academic Institution), SCORPION (Emergent BioSolutions/Trubion, Zymogenetics/BMS), Dual Affinity Retargeting Technology (Fc-DART) (MacroGenics) and Dual(ScFv)2-Fab (National Research Center for Antibody Medicine—China), Dual-Action or Bis-Fab (Genentech), Dock-and-Lock (DNL) (ImmunoMedics), Bivalent Bispecific (Biotecnol) and Fab-Fv (UCB-Celltech). ScFv-, diabody-based, and domain antibodies, include but are not limited to, Bispecific T Cell Engager (BiTE) (Micromet), Tandem Diabody (Tandab) (Affimed), Dual Affinity Retargeting Technology (DART) (MacroGenics), Single-chain Diabody (Academic), TCR-like Antibodies (AIT, ReceptorLogics), Human Serum Albumin ScFv Fusion (Merrimack) and COMBODY (Epigen Biotech), dual targeting nanobodies (Ablynx), dual targeting heavy chain only domain antibodies.

[0677] The antigen binding domains that bind CD3ε of the disclosure may also be engineered into multispecific proteins which comprise three polypeptide chains. In such designs, at least one antigen binding domain is in the form of a scFv. Exemplary designs include (in which “1” indicates the first antigen binding domain, “2” indicates the second antigen binding domain and “3” indicates the third antigen binding domain:

[0678] Design 1: Chain A) scFv1-CH2-CH3; Chain B) VL2-CL; Chain C) VH2-CH1-hinge-CH2-CH3

[0679] Design 2: Chain A) scFv1-hinge-CH2-CH3; Chain B) VL2-CL; Chain C) VH2-CH1-hinge-CH2-CH3

[0680] Design 3: Chain A) scFv1-CH1-hinge-CH2-CH3; Chain B) VL2-CL; Chain C) VH2-CH1-hinge-CH2-CH3

[0681] Design 4: Chain A) CH2-CH3-scFv1; Chain B) VL2-CL; Chain C) VH2-CH1-hinge-CH2-CH3

[0682] CH3 engineering may be incorporated to the Designs 1-4, such as mutations L351Y_F405A_Y407V/T394W, T366I_K392M_T394W/F405A_Y407V, T366L_K392M_T394W/F405A_Y407V, L351Y_Y407A/T366A_K409F, L351Y_Y407A/T366V_K409F, Y407A/T366A_K409F, or T350V_L351Y_F405A_Y407V/T350V_T366L_K392L_T394W as described in US2012/0149876 or US2013/0195849 (Zymeworks).

### Isotypes, Allotypes and Fc Engineering

[0683] The Ig constant region or the fragment of the Ig constant region, such as the Fc region present in the proteins of the disclosure may be of any allotype or isotype.

[0684] In other embodiments, the Ig constant region or the fragment of the Ig constant region is an IgG1 isotype.

[0685] In other embodiments, the Ig constant region or the fragment of the Ig constant region is an IgG2 isotype.

[0686] In other embodiments, the Ig constant region or the fragment of the Ig constant region is an IgG3 isotype.

[0687] In other embodiments, the Ig constant region or the fragment of the Ig constant region is an IgG4 isotype.

[0688] The Ig constant region or the fragment of the Ig constant region may be of any allotype. It is expected that allotype has no influence on properties of the Ig constant region, such as binding or Fc-mediated effector functions. Immunogenicity of therapeutic proteins comprising Ig constant regions of fragments thereof is associated with increased risk of infusion reactions and decreased duration of therapeutic response (Baert et al., (2003) N Engl J Med 348:602-08). The extent to which therapeutic proteins comprising Ig constant regions of fragments thereof induce an immune response in the host may be determined in part by the allotype of the Ig constant region (Stickler et al., (2011) Genes and Immunity 12:213-21). Ig constant region allotype is related to amino acid sequence variations at specific locations in the constant region sequences of the antibody. Table 3 shows select IgG1, IgG2 and IgG4 allotypes.

TABLE 3

| | Amino acid residue at position of diversity | | | | | | | |
|---|---|---|---|---|---|---|---|---|
| | (residue numbering: EU Index) | | | | | | | |
| | IgG2 | | IgG4 | | IgG1 | | | |
| Allotype | 189 | 282 | 309 | 422 | 214 | 356 | 358 | 431 |
| G2m(n) | T | M | | | | | | |
| G2m(n−) | P | V | | | | | | |
| G2m(n)/(n−) | T | V | | | | | | |
| nG4m(a) | | | L | R | | | | |
| G1m(17) | | | | | K | E | M | A |
| G1m(17, 1) | | | | | K | D | L | A |
| G1m(3) | | | | | R | E | M | A |

[0689] C-terminal lysine (CTL) may be removed from the Ig constant region by endogenous circulating carboxypeptidases in the blood stream (Cai et al., (2011) Biotechnol Bioeng 108:404-412). During manufacturing, CTL removal may be controlled to less than the maximum level by control of concentration of extracellular Zn²⁺, EDTA or EDTA-Fe³⁺ as described in U.S. Patent Publ. No. US20140273092. CTL content of proteins may be measured using known methods.

[0690] In other embodiments, the antigen binding fragment that binds CD3ε conjugated to the Ig constant region has a C-terminal lysine content from about 10% to about 90%. In other embodiments, the C-terminal lysine content is from about 20% to about 80%. In other embodiments, the C-terminal lysine content is from about 40% to about 70%. In other embodiments, the C-terminal lysine content is from about 55% to about 70%. In other embodiments, the C-terminal lysine content is about 60%.

[0691] Fc region mutations may be made to the antigen binding domains that bind CD3ε conjugated to the Ig constant region or to the fragment of the Ig constant region to modulate their effector functions such as ADCC, ADCP and/or ADCP and/or pharmacokinetic properties. This may be achieved by introducing mutation(s) into the Fc that modulate binding of the mutated Fc to activating FcγRs (FcγRI, FcγRIIa, FcγRIII), inhibitory FcγRIIb and/or to FcRn.

[0692] In other embodiments, the antigen binding domain that binds CD3ε conjugated to the Ig constant region or the fragment of the Ig constant region comprises at least one mutation in the Ig constant region or in the fragment of the Ig constant region.

[0693] In other embodiments, the at least one mutation is in the Fc region.

[0694] In other embodiments, the antigen binding domain that binds CD3ε conjugated to the Ig constant region or to the fragment of the Ig constant region comprises at least one, two, three, four, five, six, seven, eight, nine, ten, eleven, twelve, thirteen, fourteen or fifteen mutations in the Fc region.

[0695] In other embodiments, the antigen binding domain that binds CD3ε conjugated to the Ig constant region or to the fragment of the Ig constant region comprises at least one mutation in the Fc region that modulates binding of the antibody to FcRn.

[0696] Fc positions that may be mutated to modulate half-life (e.g. binding to FcRn) include positions 250, 252, 253, 254, 256, 257, 307, 376, 380, 428, 434 and 435. Exemplary mutations that may be made singularly or in combination are mutations T250Q, M252Y, I253A, S254T, T256E, P257I, T307A, D376V, E380A, M428L, H433K, N434S, N434A, N434H, N434F, H435A and H435R. Exemplary singular or combination mutations that may be made to increase the half-life are mutations M428L/N434S, M252Y/S254T/T256E, T250Q/M428L, N434A and T307A/E380A/N434A. Exemplary singular or combination mutations that may be made to reduce the half-life are mutations H435A, P257I/N434H, D376V/N434H, M252Y/S254T/T256E/H433K/N434F, T308P/N434A and H435R.

[0697] In other embodiments, the antigen binding domain that binds CD3ε conjugated to the Ig constant region or to the fragment of the Ig constant region comprises M252Y/S254T/T256E mutation.

[0698] In other embodiments, the antigen binding domain that binds CD3ε conjugated to the Ig constant region or to the fragment of the Ig constant region comprises at least one mutation in the Fc region that reduces binding of the protein to an activating Fcγ receptor (FcγR) and/or reduces Fc effector functions such as C1q binding, complement dependent cytotoxicity (CDC), antibody-dependent cell-mediated cytotoxicity (ADCC) or phagocytosis (ADCP).

[0699] Fc positions that may be mutated to reduce binding of the protein to the activating FcγR and subsequently to reduce effector function include positions 214, 233, 234, 235, 236, 237, 238, 265, 267, 268, 270, 295, 297, 309, 327, 328, 329, 330, 331 and 365. Exemplary mutations that may be made singularly or in combination are mutations K214T, E233P, L234V, L234A, deletion of G236, V234A, F234A, L235A, G237A, P238A, P238S, D265A, S267E, H268A, H268Q, Q268A, N297A, A327Q, P329A, D270A, Q295A, V309L, A327S, L328F, A330S and P331S in IgG1, IgG2, IgG3 or IgG4. Exemplary combination mutations that result in proteins with reduced ADCC are mutations L234A/L235A on IgG1, L234A/L235A/D265S on IgG1, V234A/G237A/P238S/H268A/V309L/A330S/P331S on IgG2, F234A/L235A on IgG4, S228P/F234A/L235A on IgG4, N297A on all Ig isotypes, V234A/G237A on IgG2, K214T/E233P/L234V/L235A/G236-deleted/A327G/P331A/D365E/L358M on IgG1, H268Q/V309L/A330S/P331S on IgG2, S267E/L328F on IgG1, L234F/L235E/D265A on IgG1, L234A/L235A/G237A/P238S/H268A/A330S/P331S on IgG1, S228P/F234A/L235A/G237A/P238S on IgG4, and S228P/F234A/L235A/G236-deleted/G237A/P238S on IgG4. Hybrid IgG2/4 Fc domains may also be used, such as Fc with residues 117-260 from IgG2 and residues 261-447 from IgG4.

[0700] Exemplary mutation that result in proteins with reduced CDC is a K322A mutation.

[0701] Well-known S228P mutation may be made in IgG4 to enhance IgG4 stability.

[0702] In other embodiments, the antigen binding domain that binds CD3ε conjugated to the Ig constant region or to the fragment of the Ig constant region comprises at least one mutation selected from the group consisting of K214T, E233P, L234V, L234A, deletion of G236, V234A, F234A, L235A, G237A, P238A, P238S, D265A, S267E, H268A, H268Q, Q268A, N297A, A327Q, P329A, D270A, Q295A, V309L, A327S, L328F, K322, A330S and P331S.

[0703] In other embodiments, the antigen binding domain that binds CD3ε conjugated to the Ig constant region or to the fragment of the Ig constant region comprises L234A/L235A/D265S mutation.

[0704] In other embodiments, the antigen binding domain that binds CD3ε conjugated to the Ig constant region or to the fragment of the Ig constant region comprises L234A/L235A mutation.

[0705] In other embodiments, the antigen binding domain that binds CD3ε conjugated to the Ig constant region or to the fragment of the Ig constant region comprises at least one mutation in the Fc region that enhances binding of the protein to an Fcγ receptor (FcγR) and/or enhances Fc effector functions such as C1q binding, complement dependent cytotoxicity (CDC), antibody-dependent cell-mediated cytotoxicity (ADCC) and/or phagocytosis (ADCP).

[0706] Fc positions that may be mutated to increase binding of the protein to the activating FcγR and/or enhance Fc effector functions include positions 236, 239, 243, 256, 290, 292, 298, 300, 305, 312, 326, 330, 332, 333, 334, 345, 360, 339, 378, 396 or 430 (residue numbering according to the EU index). Exemplary mutations that may be made singularly or in combination are G236A, S239D, F243L, T256A, K290A, R292P, S298A, Y300L, V305L, K326A, A330K, I332E, E333A, K334A, A339T and P396L. Exemplary combination mutations that result in proteins with increased ADCC or ADCP are a S239D/I332E, S298A/E333A/K334A, F243L/R292P/Y300L, F243L/R292P/Y300L/P396L, F243L/R292P/Y300L/V305I/P396L and G236A/S239D/I332E.

[0707] Fc positions that may be mutated to enhance CDC include positions 267, 268, 324, 326, 333, 345 and 430. Exemplary mutations that may be made singularly or in combination are S267E, F1268F, S324T, K326A, K326W, E333A, E345K, E345Q, E345R, E345Y, E430S, E430F and E430T. Exemplary combination mutations that result in proteins with increased CDC are K326A/E333A, K326W/E333A, H268F/S324T, S267E/H268F, S267E/S324T and S267E/H268F/S324T.

[0708] The specific mutations described herein are mutations when compared to the IgG1, IgG2 and IgG4 wild-type amino acid sequences of SEQ ID NOs: 237, 238, and 239, respectively.

wild-type IgG1,
SEQ ID NO: 237
[sequence omitted]
wild-type IgG2;
SEQ ID NO: 238
ASTKGPSVFPLAPCSRSTSESTAALGCLVKDYFPEPVTVSWNSGALTSG
VHTFPAVLQSSGLYSLSSVVTVPSSNFGTQTYTCNVDHKPSNTKVDKTV
ERKCCVECPPCPAPPVAGPSVFLFPPKPKDTLMISRTPEVTCVVVDVSH
EDPEVQFNWYVDGVEVHNAKTKPREEQFNSTFRVVSVLTVVHQDWLNGK
EYKCKVSNKGLPAPIEKTISKTKGQPREPQVYTLPPSREEMTKNQVSLT
CLVKGFYPSDISVEWESNGQPENNYKTTPPMLDSDGSFFLYSKLTVDKS
RWQQGNVFSCSVMHEALHNHYTQKSLSLSPGK
wild-type IgG4;
SEQ ID NO: 239
ASTKGPSVFPLAPCSRSTSESTAALGCLVKDYFPEPVTVSWNSGALTSG
VHTFPAVLQSSGLYSLSSVVTVPSSSLGTKTYTCNVDHKPSNTKVDKRV
ESKYGPPCPSCPAPEFLGGPSVFLFPPKPKDTLMISRTPEVTCVVVDVS
QEDPEVQFNWYVDGVEVHNAKTKPREEQFNSTYRVVSVLTVLHQDWLNG
KEYKCKVSNKGLPSSIEKTISKAKGQPREPQVYTLPPSQEEMTKNQVSL
TCLVKGFYPSDIAVEWESNGQPENNYKTTPPVLDSDGSFFLYSRLTVDK
SRWQEGNVFSCSVMHEALHNHYTQKSLSLSLGK

[0709] Binding of the antibody to FcγR or FcRn may be assessed on cells engineered to express each receptor using flow cytometry. In an exemplary binding assay, 2×10⁵ cells per well are seeded in 96-well plate and blocked in BSA Stain Buffer (BD Biosciences, San Jose, USA) for 30 min at 4° C. Cells are incubated with a test antibody on ice for 1.5 hour at 4° C. After being washed twice with BSA stain buffer, the cells are incubated with R-PE labeled anti-human IgG secondary antibody (Jackson Immunoresearch Laboratories) for 45 min at 4° C. The cells are washed twice in stain buffer and then resuspended in 150 μL of Stain Buffer containing 1:200 diluted DRAQ7 live/dead stain (Cell Signaling Technology, Danvers, USA). PE and DRAQ7 signals of the stained cells are detected by Miltenyi MACSQuant flow cytometer (Miltenyi Biotec, Auburn, USA) using B2 and B4 channel respectively. Live cells are gated on DRAQ7 exclusion and the geometric mean fluorescence signals are determined for at least 10,000 live events collected. FlowJo software (Tree Star) is used for analysis. Data is plotted as the logarithm of antibody concentration versus mean fluorescence signals. Nonlinear regression analysis is performed.

### Glycoengineering

[0710] The ability of the antigen binding domain that binds CD3ε conjugated to the Ig constant region or to the fragment of the Ig constant region to mediate ADCC can be enhanced by engineering the Ig constant region or the fragment of the Ig constant region oligosaccharide component. Human IgG1 or IgG3 are N-glycosylated at Asn297 with the majority of the glycans in the well-known biantennary G0, G0F, G1, G1F, G2 or G2F forms. Ig constant region containing proteins may be produced by non-engineered CHO cells typically have a glycan fucose content of about at least 85%. The removal of the core fucose from the biantennary complex-type oligosaccharides attached to the antigen binding domain that binds CD3ε conjugated to the Ig constant region or to the fragment of the Ig constant region enhances the ADCC of the protein via improved FcγRIIIa binding without altering antigen binding or CDC activity. Such proteins can be achieved using different methods reported to lead to the successful expression of relatively high defucosylated immunoglobulins bearing the biantennary complex-type of Fc oligosaccharides such as control of culture osmolality (Konno et al., Cytotechnology 64(:249-65, 2012), application of a variant CHO line Lec13 as the host cell line (Shields et al., J Biol Chem 277:26733-26740, 2002), application of a variant CHO line EB66 as the host cell line (Olivier et al., MAbs; 2(4): 405-415, 2010; PMID:20562582), application of a rat hybridoma cell line YB2/0 as the host cell line (Shinkawa et al., J Biol Chem 278:3466-3473, 2003), introduction of small interfering RNA specifically against the a 1,6-fucosyltrasferase (FUT8) gene (Mori et al., Biotechnol Bioeng 88:901-908, 2004), or coexpression of β-1,4-N-acetylglucosaminyltransferase III and Golgi α-mannosidase II or a potent alpha-mannosidase I inhibitor, kifunensine (Ferrara et al., J Biol Chem 281:5032-5036, 2006, Ferrara et al., Biotechnol Bioeng 93:851-861, 2006; Xhou et al., Biotechnol Bioeng 99:652-65, 2008).

[0711] In other embodiments, the antigen binding domain that binds CD3ε conjugated to the Ig constant region or to the fragment of the Ig constant region of the disclosure has a biantennary glycan structure with fucose content of about between 1% to about 15%, for example about 15%, 14%, 13%, 12%, 11% 10%, 9%, 8%, 7%, 6%, 5%, 4%, 3%, 2% or 1%. In other embodiments, the antigen binding domain that binds CD3ε conjugated to the Ig constant region or to the fragment of the Ig constant region has a glycan structure with fucose content of about 50%, 40%, 45%, 40%, 35%, 30%, 25%, or 20%.

[0712] “Fucose content” means the amount of the fucose monosaccharide within the sugar chain at Asn297. The relative amount of fucose is the percentage of fucose-containing structures related to all glycostructures. These may be characterized and quantified by multiple methods, for example: 1) using MALDI-TOF of N-glycosidase F treated sample (e.g. complex, hybrid and oligo- and high-mannose structures) as described in Int Pat. Publ. No. WO2008/077546 2); 2) by enzymatic release of the Asn297 glycans with subsequent derivatization and detection/quantitation by HPLC (UPLC) with fluorescence detection and/or HPLC-MS (UPLC-MS); 3) intact protein analysis of the native or reduced mAb, with or without treatment of the Asn297 glycans with Endo S or other enzyme that cleaves between the first and the second GlcNAc monosaccharides, leaving the fucose attached to the first GlcNAc; 4) digestion of the mAb to constituent peptides by enzymatic digestion (e.g., trypsin or endopeptidase Lys-C), and subsequent separation, detection and quantitation by HPLC-MS (UPLC-MS); 5) Separation of the mAb oligosaccharides from the mAb protein by specific enzymatic deglycosylation with PNGase F at Asn 297. The oligosaccharides thus released can be labeled with a fluorophore, separated and identified by various complementary techniques which allow: fine characterization of the glycan structures by matrix-assisted laser desorption ionization (MALDI) mass spectrometry by comparison of the experimental masses with the theoretical masses, determination of the degree of sialylation by ion exchange HPLC (GlycoSep C), separation and quantification of the oligosaccharide forms according to hydrophilicity criteria by normal-phase HPLC (GlycoSep N), and separation and quantification of the oligosaccharides by high performance capillary electrophoresis-laser induced fluorescence (HPCE-LIF).

[0713] “Low fucose” or “low fucose content” as used herein refers to the antigen binding domain that bind CD3ε conjugated to the Ig constant region or to the fragment of the Ig constant region with fucose content of about between 1%-15%.

[0714] “Normal fucose” or ‘normal fucose content” as used herein refers to the antigen binding domain that bind CD3ε conjugated to the Ig constant region or to the fragment of the Ig constant region with fucose content of about over 50%, typically about over 80% or over 85%.

### Anti-Idiotypic Antibodies

[0715] Anti-idiotypic antibodies are antibodies that specifically bind to the antigen binding domain that binds CD3ε of the disclosure.

[0716] The invention also provides an anti-idiotypic antibody that specifically binds to the antigen binding domain that binds CD3ε of the disclosure.

[0717] The invention also provides an anti-idiotypic antibody that specifically binds to the antigen binding domain that binds CD3ε comprising
[0718] the VH of SEQ ID NO: 55 and the VL of SEQ ID NO: 59;
[0719] the VH of SEQ ID NO: 55 and the VL of SEQ ID NO: 58;
[0720] the VH of SEQ ID NO: 54 and the VL of SEQ ID NO: 56;
[0721] the VH of SEQ ID NO: 48 and the VL of SEQ ID NO: 58;
[0722] the VH of SEQ ID NO: 88 and the VL of SEQ ID NO: 58; or
[0723] the VH of SEQ ID NO: 242 and the VL of SEQ ID NO: 58.

[0724] An anti-idiotypic (Id) antibody is an antibody which recognizes the antigenic determinants (e.g. the paratope or CDRs) of the antibody. The Id antibody may be antigen-blocking or non-blocking. The antigen-blocking Id may be used to detect the free antigen binding domain in a sample (e.g. the antigen binding domain that binds CD3ε of the disclosure). The non-blocking Id may be used to detect the total antibody (free, partially bond to antigen, or fully bound to antigen) in a sample. An Id antibody may be prepared by immunizing an animal with the antibody to which an anti-Id is being prepared.

[0725] An anti-Id antibody may also be used as an immunogen to induce an immune response in yet another animal, producing a so-called anti-anti-Id antibody. An anti-anti-Id may be epitopically identical to the original antigen binding domain which induced the anti-Id. Thus, by using antibodies to the idiotypic determinants of the antigen binding domain, it is possible to identify other clones expressing antigen binding domains of identical specificity. Anti-Id antibodies may be varied (thereby producing anti-Id antibody variants) and/or derivatized by any suitable technique, such as those described elsewhere herein.

### Immunoconjugates

[0726] The antigen binding domains that bind CD3ε of the disclosure, the proteins comprising the antigen binding domains that bind CD3ε or the multispecific proteins that comprise the antigen binding domains that bind CD3ε (collectively referred herein as to CD3ε binding proteins) may be conjugated to a heterologous molecule.

[0727] In other embodiments, the heterologous molecule is a detectable label or a cytotoxic agent.

[0728] The invention also provides an antigen binding domain that binds CD3ε conjugated to a detectable label.

[0729] The invention also provides a protein comprising an antigen binding domain that binds CD3ε conjugated to a detectable label.

[0730] The invention also provides a multispecific protein comprising an antigen binding domain that binds CD3ε conjugated to a detectable label.

[0731] The invention also provides an antigen binding domain that binds CD3ε conjugated to a cytotoxic agent.

[0732] The invention also provides a protein comprising an antigen binding domain that binds CD3ε conjugated to a cytotoxic agent.

[0733] The invention also provides a multispecific protein comprising an antigen binding domain that binds CD3ε conjugated to a cytotoxic agent.

[0734] CD3ε binding proteins of the disclosure may be used to direct therapeutics to tumor antigen expressing cells. Alternatively, CD3ε expressing cells may be targeted with a CD3ε binding protein of the disclosure coupled to a therapeutic intended to modify cell function once internalized.

[0735] In other embodiments, the detectable label is also a cytotoxic agent.

[0736] The CD3ε binding proteins of the disclosure conjugated to a detectable label may be used to evaluate expression of CD3ε on a variety of samples.

[0737] Detectable label includes compositions that when conjugated to the CD3ε binding proteins of the disclosure renders the latter detectable, via spectroscopic, photochemical, biochemical, immunochemical, or chemical means.

[0738] Exemplary detectable labels include radioactive isotopes, magnetic beads, metallic beads, colloidal particles, fluorescent dyes, electron-dense reagents, enzymes (for example, as commonly used in an ELISA), biotin, digoxigenin, haptens, luminescent molecules, chemiluminescent molecules, fluorochromes, fluorophores, fluorescent quenching agents, colored molecules, radioactive isotopes, scintillates, avidin, streptavidin, protein A, protein G, antibodies or fragments thereof, polyhistidine, Ni²⁺, Flag tags, myc tags, heavy metals, enzymes, alkaline phosphatase, peroxidase, luciferase, electron donors/acceptors, acridinium esters, and colorimetric substrates.

[0739] A detectable label may emit a signal spontaneously, such as when the detectable label is a radioactive isotope. In other cases, the detectable label emits a signal as a result of being stimulated by an external field.

[0740] Exemplary radioactive isotopes may be γ-emitting, Auger-emitting, β-emitting, an alpha-emitting or positron-emitting radioactive isotope. Exemplary radioactive isotopes include ³H, ¹¹C, ¹³C, ¹⁵N, ¹⁸F, ¹⁹F, ⁵⁵Co, ⁵⁷Co, ⁶⁰Co, ⁶¹Cu, ⁶²Cu, ⁶⁴Cu, ⁶⁷Cu, ⁶⁸Ga, ⁷²As, ⁷⁵Br, ⁸⁶Y, ⁸⁹Zr, ⁹⁰Sr, ^{94m}Tc, ^{99m}Tc, ¹¹⁵In, ¹²³I, ¹²⁴I, ¹²⁵I, ¹³¹I, ²¹¹At, ²¹²Bi, ²¹³Bi, ²²³Ra, ²²⁶Ra, ²²⁵Ac and ²²⁷Ac.

[0741] Exemplary metal atoms are metals with an atomic number greater than 20, such as calcium atoms, scandium atoms, titanium atoms, vanadium atoms, chromium atoms, manganese atoms, iron atoms, cobalt atoms, nickel atoms, copper atoms, zinc atoms, gallium atoms, germanium atoms, arsenic atoms, selenium atoms, bromine atoms, krypton atoms, rubidium atoms, strontium atoms, yttrium atoms, zirconium atoms, niobium atoms, molybdenum atoms, technetium atoms, ruthenium atoms, rhodium atoms, palladium atoms, silver atoms, cadmium atoms, indium atoms, tin atoms, antimony atoms, tellurium atoms, iodine atoms, xenon atoms, cesium atoms, barium atoms, lanthanum atoms, hafnium atoms, tantalum atoms, tungsten atoms, rhenium atoms, osmium atoms, iridium atoms, platinum atoms, gold atoms, mercury atoms, thallium atoms, lead atoms, bismuth atoms, francium atoms, radium atoms, actinium atoms, cerium atoms, praseodymium atoms, neodymium atoms, promethium atoms, samarium atoms, europium atoms, gadolinium atoms, terbium atoms, dysprosium atoms, holmium atoms, erbium atoms, thulium atoms, ytterbium atoms, lutetium atoms, thorium atoms, protactinium atoms, uranium atoms, neptunium atoms, plutonium atoms, americium atoms, curium atoms, berkelium atoms, californium atoms, einsteinium atoms, fermium atoms, mendelevium atoms, nobelium atoms, or lawrencium atoms.

[0742] In other embodiments, the metal atoms may be alkaline earth metals with an atomic number greater than twenty.

[0743] In other embodiments, the metal atoms may be lanthanides.

[0744] In other embodiments, the metal atoms may be actinides.

[0745] In other embodiments, the metal atoms may be transition metals.

[0746] In other embodiments, the metal atoms may be poor metals.

[0747] In other embodiments, the metal atoms may be gold atoms, bismuth atoms, tantalum atoms, and gadolinium atoms.

[0748] In other embodiments, the metal atoms may be metals with an atomic number of 53 (i.e. iodine) to 83 (i.e. bismuth).

[0749] In other embodiments, the metal atoms may be atoms suitable for magnetic resonance imaging.

[0750] The metal atoms may be metal ions in the form of +1, +2, or +3 oxidation states, such as Ba²⁺, Bi³⁺, Cs⁺, Ca²⁺, Cr²⁺, Cr³⁺, Cr⁶⁺, Co²⁺, Co³⁺, Cu⁺, Cu²⁺, Cu³⁺, Ga³⁺, Gd³⁺, Au⁺, Au³⁺, Fe²⁺, Fe³⁺, F³⁺, Pb²⁺, Mn²⁺, Mn³⁺, Mn⁴⁺, Mn⁷⁺, Hg²⁺, Ni²⁺, Ni³⁺, Ag⁺, Sn²⁺, Sn⁴⁺, and Zn²⁺. The metal atoms may comprise a metal oxide, such as iron oxide, manganese oxide, or gadolinium oxide.

[0751] Suitable dyes include any commercially available dyes such as, for example, 5(6)-carboxyfluorescein, IRDye 680RD maleimide or IRDye 800CW, ruthenium polypyridyl dyes, and the like.

[0752] Suitable fluorophores are fluorescein isothiocyanate (FITC), fluorescein thiosemicarbazide, rhodamine, Texas Red, CyDyes (e.g., Cy3, Cy5, Cy5.5), Alexa Fluors (e.g., Alexa488, Alexa555, Alexa594; Alexa647), near infrared (NIR) (700-900 nm) fluorescent dyes, and carbocyanine and aminostyryl dyes.

[0753] The antigen binding domain that binds CD3ε conjugated to a detectable label may be used as an imaging agent.

[0754] The protein comprising an antigen binding domain that binds CD3ε conjugated to a detectable label may be used as an imaging agent.

[0755] The multispecific protein comprising an antigen binding domain that binds CD3ε conjugated to a detectable label may be used as an imaging agent.

[0756] In other embodiments, the cytotoxic agent is a chemotherapeutic agent, a drug, a growth inhibitory agent, a toxin (e.g., an enzymatically active toxin of bacterial, fungal, plant, or animal origin, or fragments thereof), or a radioactive isotope (i.e., a radioconjugate).

[0757] In other embodiments, the cytotoxic agent is daunomycin, doxorubicin, methotrexate, vindesine, bacterial toxins such as diphtheria toxin, ricin, geldanamycin, maytansinoids or calicheamicin. The cytotoxic agent may elicit their cytotoxic and cytostatic effects by mechanisms including tubulin binding, DNA binding, or topoisomerase inhibition.

[0758] In other embodiments, the cytotoxic agent is an enzymatically active toxin such as diphtheria A chain, nonbinding active fragments of diphtheria toxin, exotoxin A chain (from Pseudomonas aeruginosa), ricin A chain, abrin A chain, modeccin A chain, alpha-sarcin, Aleurites fordii proteins, dianthin proteins, Phytolaca americana proteins (PAPI, PAPII, and PAP-S), Momordica charantia inhibitor, curcin, crotin, Sapaonaria officinalis inhibitor, gelonin, mitogellin, restrictocin, phenomycin, enomycin, and the tricothecenes.

[0759] In other embodiments, the cytotoxic agent is a radionuclide, such as ²¹²Bi, ¹³¹I, ¹³¹In, ⁹⁰Y, and ¹⁸⁶Re.

[0760] In other embodiments, the cytotoxic agent is dolastatins or dolostatin peptidic analogs and derivatives, auristatin or monomethyl auristatin phenylalanine Exemplary molecules are disclosed in U.S. Pat. Nos. 5,635,483 and 5,780,588. Dolastatins and auristatins have been shown to interfere with microtubule dynamics, GTP hydrolysis, and nuclear and cellular division (Woyke et al (2001) Antimicrob Agents and Chemother. 45(12):3580-3584) and have anticancer and antifungal activity. The dolastatin or auristatin drug moiety may be attached to the antibody of the invention through the N (amino) terminus or the C (carboxyl) terminus of the peptidic drug moiety (WO02/088172), or via any cysteine engineered into the antibody.

[0761] The CD3ε binding proteins of the disclosure may be conjugated to a detectable label using known methods.

[0762] In other embodiments, the detectable label is complexed with a chelating agent.

[0763] In other embodiments, the detectable label is conjugated to the CD3ε binding proteins of the disclosure via a linker.

[0764] The detectable label or the cytotoxic moiety may be linked directly, or indirectly, to the CD3ε binding proteins of the disclosure using known methods. Suitable linkers are known in the art and include, for example, prosthetic groups, non-phenolic linkers (derivatives of N-succimidyl-benzoates; dodecaborate), chelating moieties of both macrocyclics and acyclic chelators, such as derivatives of 1,4,7,10-tetraazacyclododecane-1,4,7,10,tetraacetic acid (DOTA), derivatives of diethylenetriaminepentaacetic avid (DTPA), derivatives of S-2-(4-Isothiocyanatobenzyl)-1,4,7-triazacyclononane-1,4,7-triacetic acid (NOTA) and derivatives of 1,4,8,11-tetraazacyclodocedan-1,4,8,11-tetraacetic acid (TETA), N-succinimidyl-3-(2-pyridyldithiol) propionate (SPDP), iminothiolane (IT), bifunctional derivatives of imidoesters (such as dimethyl adipimidate HCl), active esters (such as disuccinimidyl suberate), aldehydes (such as glutaraldehyde), bis-azido compounds (such as bis(p-azidobenzoyl)hexanediamine), bis-diazonium derivatives (such as bis-(p-diazoniumbenzoyl)-ethylenediamine), diisocyanates (such as toluene 2,6-diisocyanate), and bis-active fluorine compounds (such as 1,5-difluoro-2,4-dinitrobenzene) and other chelating moieties. Suitable peptide linkers are well known.

[0765] In other embodiments, the CD3ε binding proteins of the disclosure is removed from the blood via renal clearance.

### Kits

[0766] The invention also provides a kit comprising the antigen binding domain that binds CD3ε.

[0767] The invention also provides a kit comprising the protein comprising an antigen binding domain that binds CD3ε.

[0768] The invention also provides a kit comprising the multispecific protein comprising an antigen binding domain that binds CD3ε.

[0769] The kit may be used for therapeutic uses and as diagnostic kits.

[0770] The kit may be used to detect the presence of CD3ε in a sample.

[0771] In other embodiments, the kit comprises the CD3ε binding protein of the disclosure and reagents for detecting the CD3ε binding protein. The kit can include one or more other elements including: instructions for use; other reagents, e.g., a label, a therapeutic agent, or an agent useful for chelating, or otherwise coupling, an antibody to a label or therapeutic agent, or a radioprotective composition; devices or other materials for preparing the antibody for administration; pharmaceutically acceptable carriers; and devices or other materials for administration to a subject.

[0772] In other embodiments, the kit comprises the antigen binding domain that binds CD3ε in a container and instructions for use of the kit.

[0773] In other embodiments, the kit comprises the protein comprising an antigen binding domain that binds CD3ε in a container and instructions for use of the kit.

[0774] In other embodiments, the kit comprises the multispecific protein comprising an antigen binding domain that binds CD3ε in a container and instructions for use of the kit.

[0775] In other embodiments, the antigen binding domain that binds CD3ε in the kit is labeled.

[0776] In other embodiments, the protein comprising an antigen binding domain that binds CD3ε in the kit is labeled.

[0777] In other embodiments, the multispecific protein comprising an antigen binding domain that binds CD3ε in the kit is labeled.

[0778] In other embodiments, the kit comprises the antigen binding domain that binds CD3ε comprising
[0779] the VH of SEQ ID NO: 55 and the VL of SEQ ID NO: 59;
[0780] the VH of SEQ ID NO: 55 and the VL of SEQ ID NO: 58;
[0781] the VH of SEQ ID NO: 54 and the VL of SEQ ID NO: 56;
[0782] the VH of SEQ ID NO: 48 and the VL of SEQ ID NO: 58;
[0783] the VH of SEQ ID NO: 88 and the VL of SEQ ID NO: 58; or
[0784] the VH of SEQ ID NO: 242 and the VL of SEQ ID NO: 58.

[0785] In other embodiments, the kit comprises the antigen binding domain that binds CD3ε comprising SEQ ID NOs: 96, 97, 98, 99, 100, 101, 102, 103, 104, 105, 106, 107, 108, 109, 110, 111, 112, 113, 114, 115, 116, 117, 118, 119, 120, 121, 122, 123, 124, 125, or 126.

### Methods of Detecting CD3ε

[0786] The invention also provides a method of detecting CD3ε in a sample, comprising obtaining the sample, contacting the sample with the antigen binding domain that binds CD3ε of the disclosure and detecting the bound CD3ε in the sample.

[0787] In other embodiments, the sample may be derived from urine, blood, serum, plasma, saliva, ascites, circulating cells, synovial fluid, circulating cells, cells that are not tissue associated (i.e., free cells), tissues (e.g., surgically resected tissue, biopsies, including fine needle aspiration), histological preparations, and the like.

[0788] The antigen binding domain that binds CD3ε of the disclosure may be detected using known methods. Exemplary methods include direct labeling of the antibodies using fluorescent or chemiluminescent labels, or radiolabels, or attaching to the antibodies of the invention a moiety which is readily detectable, such as biotin, enzymes or epitope tags. Exemplary labels and moieties are ruthenium, ¹¹¹In-DOTA, ¹¹¹In-diethylenetriaminepentaacetic acid (DTPA), horseradish peroxidase, alkaline phosphatase and beta-galactosidase, poly-histidine (HIS tag), acridine dyes, cyanine dyes, fluorone dyes, oxazin dyes, phenanthridine dyes, rhodamine dyes and Alexafluor® dyes.

[0789] The antigen binding domain that binds CD3ε of the disclosure may be used in a variety of assays to detect CD3ε in the sample. Exemplary assays are western blot analysis, radioimmunoassay, surface plasmon resonance, immunoprecipitation, equilibrium dialysis, immunodiffusion, electrochemiluminescence (ECL) immunoassay, immunohistochemistry, fluorescence-activated cell sorting (FACS) or ELISA assay.

### Polynucleotides, Vectors, Host Cells

[0790] The disclosure also provides an isolated polynucleotide encoding any of the CD3ε binding proteins of the disclosure. The CD3ε binding protein includes the antigen binding domains that bind CD3ε, the proteins comprising the antigen binding domains that bind CD3ε, the multispecific proteins that comprise the antigen binding domains that bind CD3ε of the disclosure.

[0791] The invention also provides an isolated polynucleotide encoding any of CD3ε biding proteins or fragments thereof.

[0792] The invention also provides an isolated polynucleotide encoding the VH of SEQ ID NOs: 55, 54, or 48.

[0793] The invention also provides an isolated polynucleotide encoding the VL of SEQ ID NOs: 59, 58 or 56.

[0794] The invention also provides an isolated polynucleotide encoding the VH of SEQ ID NO: 55.

[0795] The invention also provides an isolated polynucleotide encoding the VH of SEQ ID NO: 54.

[0796] The invention also provides an isolated polynucleotide encoding the VH of SEQ ID NO: 48.

[0797] The invention also provides an isolated polynucleotide encoding the VL of SEQ ID NO: 59.

[0798] The invention also provides an isolated polynucleotide encoding the VL of SEQ ID NO: 58.

[0799] The invention also provides an isolated polynucleotide encoding the VL of SEQ ID NO: 56.

[0800] The invention also provides an isolated polynucleotide encoding the VH of SEQ ID NOs: 55, 54, or 48 and the VL of SEQ ID NOs: 24, 27, 28, 29 or 30.

[0801] The invention also provides for an isolated polynucleotide encoding
[0802] the VH of SEQ ID NO: 55 and the VL of SEQ ID NO: 59;
[0803] the VH of SEQ ID NO: 55 and the VL of SEQ ID NO: 58;
[0804] the VH of SEQ ID NO: 54 and the VL of SEQ ID NO: 56;
[0805] the VH of SEQ ID NO: 48 and the VL of SEQ ID NO: 58;
[0806] the VH of SEQ ID NO: 88 and the VL of SEQ ID NO: 58; or
[0807] the VH of SEQ ID NO: 242 and the VL of SEQ ID NO: 58.

[0808] The invention also provides an isolated polynucleotide encoding the polypeptide of SEQ ID NOs: 96, 97, 98, 99, 100, 101, 102, 103, 104, 105, 106, 107, 108, 109, 110, 111, 112, 113, 114, 115, 116, 117, 118, 119, 120, 121, 122, 123, 124, 125, or 126.

[0809] The invention also provides an isolated polynucleotide encoding the polypeptide of SEQ ID NO: 96.

[0810] The invention also provides an isolated polynucleotide encoding the polypeptide of SEQ ID NO: 97.

[0811] The invention also provides an isolated polynucleotide encoding the polypeptide of SEQ ID NO: 98.

[0812] The invention also provides an isolated polynucleotide encoding the polypeptide of SEQ ID NO: 99.

[0813] The invention also provides an isolated polynucleotide encoding the polypeptide of SEQ ID NO: 100.

[0814] The invention also provides an isolated polynucleotide encoding the polypeptide of SEQ ID NO: 101.

[0815] The invention also provides an isolated polynucleotide encoding the polypeptide of SEQ ID NO: 102.

[0816] The invention also provides an isolated polynucleotide encoding the polypeptide of SEQ ID NO: 103.

[0817] The invention also provides an isolated polynucleotide encoding the polypeptide of SEQ ID NO: 104.

[0818] The invention also provides an isolated polynucleotide encoding the polypeptide of SEQ ID NO: 105.

[0819] The invention also provides an isolated polynucleotide encoding the polypeptide of SEQ ID NO: 106.

[0820] The invention also provides an isolated polynucleotide encoding the polypeptide of SEQ ID NO: 107.

[0821] The invention also provides an isolated polynucleotide encoding the polypeptide of SEQ ID NO: 108.

[0822] The invention also provides an isolated polynucleotide encoding the polypeptide of SEQ ID NO: 109.

[0823] The invention also provides an isolated polynucleotide encoding the polypeptide of SEQ ID NO: 110.

[0824] The invention also provides an isolated polynucleotide encoding the polypeptide of SEQ ID NO: 112.

[0825] The invention also provides an isolated polynucleotide encoding the polypeptide of SEQ ID NO: 113.

[0826] The invention also provides an isolated polynucleotide encoding the polypeptide of SEQ ID NO: 114.

[0827] The invention also provides an isolated polynucleotide encoding the polypeptide of SEQ ID NO: 115.

[0828] The invention also provides an isolated polynucleotide encoding the polypeptide of SEQ ID NO: 116.

[0829] The invention also provides an isolated polynucleotide encoding the polypeptide of SEQ ID NO: 117.

[0830] The invention also provides an isolated polynucleotide encoding the polypeptide of SEQ ID NO: 118.

[0831] The invention also provides an isolated polynucleotide encoding the polypeptide of SEQ ID NO: 119.

[0832] The invention also provides an isolated polynucleotide encoding the polypeptide of SEQ ID NO: 120.

[0833] The invention also provides an isolated polynucleotide encoding the polypeptide of SEQ ID NO: 121.

[0834] The invention also provides an isolated polynucleotide encoding the polypeptide of SEQ ID NO: 122.

[0835] The invention also provides an isolated polynucleotide encoding the polypeptide of SEQ ID NO: 123.

[0836] The invention also provides an isolated polynucleotide encoding the polypeptide of SEQ ID NO: 124.

[0837] The invention also provides an isolated polynucleotide encoding the polypeptide of SEQ ID NO: 125.

[0838] The invention also provides an isolated polynucleotide encoding the polypeptide of SEQ ID NO: 126.

[0839] Some embodiments of the disclosure also provide an isolated or purified nucleic acid comprising a polynucleotide which is complementary to the polynucleotides encoding the CD3ε binding proteins of the disclosure or polynucleotides which hybridize under stringent conditions to the polynucleotides encoding the CD3ε binding proteins of the disclosure.

[0840] The polynucleotides which hybridize under stringent conditions may hybridize under high stringency conditions. By “high stringency conditions” is meant that the polynucleotide specifically hybridizes to a target sequence (the nucleotide sequence of any of the nucleic acids described herein) in an amount that is detectably stronger than non-specific hybridization. High stringency conditions include conditions which would distinguish a polynucleotide with an exact complementary sequence, or one containing only a few scattered mismatches from a random sequence that happened to have a few small regions (e.g., 3-12 bases) that matched the nucleotide sequence. Such small regions of complementarity are more easily melted than a full-length complement of 14-17 or more bases, and high stringency hybridization makes them easily distinguishable. Relatively high stringency conditions would include, for example, low salt and/or high temperature conditions, such as provided by about 0.02-0.1 M NaCl or the equivalent, at temperatures of about 50-70° C. Such high stringency conditions tolerate little, if any, mismatch between the nucleotide sequence and the template or target strand. It is generally appreciated that conditions can be rendered more stringent by the addition of increasing amounts of formamide.

[0841] The polynucleotide sequences of the disclosure may be operably linked to one or more regulatory elements, such as a promoter or enhancer, that allow expression of the nucleotide sequence in the intended host cell. The polynucleotide may be a cDNA. The promoter bay be a strong, weak, tissue-specific, inducible or developmental-specific promoter. Exemplary promoters that may be used are hypoxanthine phosphoribosyl transferase (HPRT), adenosine deaminase, pyruvate kinase, beta-actin, human myosin, human hemoglobin, human muscle creatine, and others. In addition, many viral promoters function constitutively in eukaryotic cells and are suitable for use with the described embodiments. Such viral promoters include Cytomegalovirus (CMV) immediate early promoter, the early and late promoters of SV40, the Mouse Mammary Tumor Virus (MMTV) promoter, the long terminal repeats (LTRs) of Maloney leukemia virus, Human Immunodeficiency Virus (HIV), Epstein Barr Virus (EBV), Rous Sarcoma Virus (RSV), and other retroviruses, and the thymidine kinase promoter of Herpes Simplex Virus. Inducible promoters such as the metallothionein promoter, tetracycline-inducible promoter, doxycycline-inducible promoter, promoters that contain one or more interferon-stimulated response elements (ISRE) such as protein kinase R 2′,5′-oligoadenylate synthetases, Mx genes, ADAR1, and the like may also be sued.

[0842] The invention also provides a vector comprising the polynucleotide of the invention. The disclosure also provide an expression vector comprising the polynucleotide of the invention. Such vectors may be plasmid vectors, viral vectors, vectors for baculovirus expression, transposon based vectors or any other vector suitable for introduction of the synthetic polynucleotide of the invention into a given organism or genetic background by any means. Polynucleotides encoding the CD3ε binding proteins of the disclosure may be operably linked to control sequences in the expression vector(s) that ensure the expression of the CD3ε binding proteins. Such regulatory elements may include a transcriptional promoter, sequences encoding suitable mRNA ribosomal binding sites, and sequences that control the termination of transcription and translation. Expression vectors may also include one or more nontranscribed elements such as an origin of replication, a suitable promoter and enhancer linked to the gene to be expressed, other 5′ or 3′ flanking nontranscribed sequences, 5′ or 3′ nontranslated sequences (such as necessary ribosome binding sites), a polyadenylation site, splice donor and acceptor sites, or transcriptional termination sequences. An origin of replication that confers the ability to replicate in a host may also be incorporated.

[0843] The expression vectors can comprise naturally-occurring or non-naturally-occurring internucleotide linkages, or both types of linkages. The non-naturally occurring or altered nucleotides or internucleotide linkages do not hinder the transcription or replication of the vector.

[0844] Once the vector has been incorporated into the appropriate host, the host is maintained under conditions suitable for high level expression of the CD3ε binding proteins of the disclosure encoded by the incorporated polynucleotides. The transcriptional and translational control sequences in expression vectors to be used in transforming vertebrate cells may be provided by viral sources. Exemplary vectors may be constructed as described by Okayama and Berg, 3 Mol. Cell. Biol. 280 (1983).

[0845] Vectors of the disclosure may also contain one or more Internal Ribosome Entry Site(s) (IRES). Inclusion of an IRES sequence into fusion vectors may be beneficial for enhancing expression of some proteins. In other embodiments, the vector system will include one or more polyadenylation sites (e.g., SV40), which may be upstream or downstream of any of the aforementioned nucleic acid sequences. Vector components may be contiguously linked or arranged in a manner that provides optimal spacing for expressing the gene products (i.e., by the introduction of “spacer” nucleotides between the ORFs) or positioned in another way. Regulatory elements, such as the IRES motif, may also be arranged to provide optimal spacing for expression.

[0846] Vectors of the disclosure may be circular or linear. They may be prepared to contain a replication system functional in a prokaryotic or eukaryotic host cell. Replication systems can be derived, e.g., from ColE1, SV40, 2μ plasmid, λ, bovine papilloma virus, and the like.

[0847] The recombinant expression vectors can be designed for either transient expression, for stable expression, or for both. Also, the recombinant expression vectors can be made for constitutive expression or for inducible expression.

[0848] Further, the recombinant expression vectors can be made to include a suicide gene. As used herein, the term “suicide gene” refers to a gene that causes the cell expressing the suicide gene to die. The suicide gene can be a gene that confers sensitivity to an agent, e.g., a drug, upon the cell in which the gene is expressed, and causes the cell to die when the cell is contacted with or exposed to the agent. Suicide genes are known in the art and include, for example, the Herpes Simplex Virus (HSV) thymidine kinase (TK) gene, cytosine deaminase, purine nucleoside phosphoryl The vectors may also comprise selection markers, which are well known in the art. Selection markers include positive and negative selection marker. Marker genes include biocide resistance, e.g., resistance to antibiotics, heavy metals, etc., complementation in an auxotrophic host to provide prototrophy, and the like. Exemplary marker genes include antibiotic resistance genes (e.g., neomycin resistance gene, a hygromycin resistance gene, a kanamycin resistance gene, a tetracycline resistance gene, a penicillin resistance gene, histidinol resistance gene, histidinol x resistance gene), glutamine synthase genes, HSV-TK, HSV-TK derivatives for ganciclovir selection, or bacterial purine nucleoside phosphorylase gene for 6-methylpurine selection (Gadi et al., 7 Gene Ther. 1738-1743 (2000)). A nucleic acid sequence encoding a selection marker or the cloning site may be upstream or downstream of a nucleic acid sequence encoding a polypeptide of interest or cloning site.

[0849] Exemplary vectors that may be used are Bacterial: pBs, phagescript, PsiX174, pBluescript SK, pBs KS, pNH8a, pNH16a, pNH18a, pNH46a (Stratagene, La Jolla, Calif., USA); pTrc99A, pKK223-3, pKK233-3, pDR540, and pRIT5 (Pharmacia, Uppsala, Sweden). Eukaryotic: pWLneo, pSV2cat, pOG44, PXR1, pSG (Stratagene) pSVK3, pBPV, pMSG and pSVL (Pharmacia), pEE6.4 (Lonza) and pEE12.4 (Lonza). Additional vectors include the pUC series (Fermentas Life Sciences, Glen Burnie, Md.), the pBluescript series (Stratagene, LaJolla, Calif.), the pET series (Novagen, Madison, Wis.), the pGEX series (Pharmacia Biotech, Uppsala, Sweden), and the pEX series (Clontech, Palo Alto, Calif.). Bacteriophage vectors, such as λGT10, λGT11, λEMBL4, and λNM1149, λZapII (Stratagene) can be used. Exemplary plant expression vectors include pBI01, pBI01.2, pBI121, pBI101.3, and pBIN19 (Clontech). Exemplary animal expression vectors include pEUK-Cl, pMAM, and pMAMneo (Clontech). The expression vector may be a viral vector, e.g., a retroviral vector, e.g., a gamma retroviral vector.ase, and nitroreductase.

[0850] In other embodiments, the vector comprises the polynucleotide encoding the VH of SEQ ID NO: 55.

[0851] In other embodiments, the vector comprises the polynucleotide encoding the VH of SEQ ID NO: 54.

[0852] In other embodiments, the vector comprises the polynucleotide encoding the VH of SEQ ID NO: 48.

[0853] In other embodiments, the vector comprises the polynucleotide encoding the VL of SEQ ID NO: 59.

[0854] In other embodiments, the vector comprises the polynucleotide encoding the VL of SEQ ID NO: 58.

[0855] In other embodiments, the vector comprises the polynucleotide encoding the VL of SEQ ID NO: 56.

[0856] In other embodiments, the vector comprises the polynucleotide encoding the VH of SEQ ID NO: 55, 54, or 48 and the VL of SEQ ID NOs: 59, 58, or 56.

[0857] In other embodiments, the vector comprises the polynucleotide encoding
[0858] the VH of SEQ ID NO: 55 and the VL of SEQ ID NO: 59;
[0859] the VH of SEQ ID NO: 55 and the VL of SEQ ID NO: 58;
[0860] the VH of SEQ ID NO: 54 and the VL of SEQ ID NO: 56;
[0861] the VH of SEQ ID NO: 48 and the VL of SEQ ID NO: 58;
[0862] the VH of SEQ ID NO: 88 and the VL of SEQ ID NO: 58; or
[0863] the VH of SEQ ID NO: 242 and the VL of SEQ ID NO: 58.

[0864] In other embodiments, the vector comprises the polynucleotide encoding the polypeptide of SEQ ID NOs: SEQ ID NOs: 96, 97, 98, 99, 100, 101, 102, 103, 104, 105, 106, 107, 108, 109, 110, 111, 112, 113, 114, 115, 116, 117, 118, 119, 120, 121, 122, 123, 124, 125, or 126.

[0865] In other embodiments, the vector comprises the polynucleotide encoding the polypeptide of SEQ ID NO: 96.

[0866] In other embodiments, the vector comprises the polynucleotide encoding the polypeptide of SEQ ID NO: 97.

[0867] In other embodiments, the vector comprises the polynucleotide encoding the polypeptide of SEQ ID NO: 98.

[0868] In other embodiments, the vector comprises the polynucleotide encoding the polypeptide of SEQ ID NO: 99.

[0869] In other embodiments, the vector comprises the polynucleotide encoding the polypeptide of SEQ ID NO: 100.

[0870] In other embodiments, the vector comprises the polynucleotide encoding the polypeptide of SEQ ID NO: 101.

[0871] In other embodiments, the vector comprises the polynucleotide encoding the polypeptide of SEQ ID NO: 102.

[0872] In other embodiments, the vector comprises the polynucleotide encoding the polypeptide of SEQ ID NO: 103.

[0873] In other embodiments, the vector comprises the polynucleotide encoding the polypeptide of SEQ ID NO: 104.

[0874] In other embodiments, the vector comprises the polynucleotide encoding the polypeptide of SEQ ID NO: 105.

[0875] In other embodiments, the vector comprises the polynucleotide encoding the polypeptide of SEQ ID NO: 106.

[0876] In other embodiments, the vector comprises the polynucleotide encoding the polypeptide of SEQ ID NO: 107.

[0877] In other embodiments, the vector comprises the polynucleotide encoding the polypeptide of SEQ ID NO: 108.

[0878] In other embodiments, the vector comprises the polynucleotide encoding the polypeptide of SEQ ID NO: 109.

[0879] In other embodiments, the vector comprises the polynucleotide encoding the polypeptide of SEQ ID NO: 110.

[0880] In other embodiments, the vector comprises the polynucleotide encoding the polypeptide of SEQ ID NO: 112.

[0881] In other embodiments, the vector comprises the polynucleotide encoding the polypeptide of SEQ ID NO: 113.

[0882] In other embodiments, the vector comprises the polynucleotide encoding the polypeptide of SEQ ID NO: 114.

[0883] In other embodiments, the vector comprises the polynucleotide encoding the polypeptide of SEQ ID NO: 115.

[0884] In other embodiments, the vector comprises the polynucleotide encoding the polypeptide of SEQ ID NO: 116.

[0885] In other embodiments, the vector comprises the polynucleotide encoding the polypeptide of SEQ ID NO: 117.

[0886] In other embodiments, the vector comprises the polynucleotide encoding the polypeptide of SEQ ID NO: 118.

[0887] In other embodiments, the vector comprises the polynucleotide encoding the polypeptide of SEQ ID NO: 119.

[0888] In other embodiments, the vector comprises the polynucleotide encoding the polypeptide of SEQ ID NO: 120.

[0889] In other embodiments, the vector comprises the polynucleotide encoding the polypeptide of SEQ ID NO: 121.

[0890] In other embodiments, the vector comprises the polynucleotide encoding the polypeptide of SEQ ID NO: 122.

[0891] In other embodiments, the vector comprises the polynucleotide encoding the polypeptide of SEQ ID NO: 123.

[0892] In other embodiments, the vector comprises the polynucleotide encoding the polypeptide of SEQ ID NO: 124.

[0893] In other embodiments, the vector comprises the polynucleotide encoding the polypeptide of SEQ ID NO: 125.

[0894] In other embodiments, the vector comprises the polynucleotide encoding the polypeptide of SEQ ID NO: 126.

[0895] The invention also provides for a host cell comprising one or more vectors of the invention. “Host cell” refers to a cell into which a vector has been introduced. It is understood that the term host cell is intended to refer not only to the particular subject cell but to the progeny of such a cell, and also to a stable cell line generated from the particular subject cell. Because certain modifications may occur in succeeding generations due to either mutation or environmental influences, such progeny may not be identical to the parent cell, but are still included within the scope of the term “host cell” as used herein. Such host cells may be eukaryotic cells, prokaryotic cells, plant cells or archeal cells. Escherichia coli, bacilli, such as Bacillus subtilis, and other enterobacteriaceae, such as Salmonella, Serratia, and various Pseudomonas species are examples of prokaryotic host cells. Other microbes, such as yeast, are also useful for expression. Saccharomyces (e.g., S. cerevisiae) and Pichia are examples of suitable yeast host cells. Exemplary eukaryotic cells may be of mammalian, insect, avian or other animal origins. Mammalian eukaryotic cells include immortalized cell lines such as hybridomas or myeloma cell lines such as SP2/0 (American Type Culture Collection (ATCC), Manassas, Va., CRL-1581), NS0 (European Collection of Cell Cultures (ECACC), Salisbury, Wiltshire, UK, ECACC No. 85110503), FO (ATCC CRL-1646) and Ag653 (ATCC CRL-1580) murine cell lines. An exemplary human myeloma cell line is U266 (ATTC CRL-TIB-196). Other useful cell lines include those derived from Chinese Hamster Ovary (CHO) cells such as CHO-K1SV (Lonza Biologics, Walkersville, Md.), CHO-K1 (ATCC CRL-61) or DG44.

[0896] The disclosure also provides a method of producing the CD3ε binding protein of the disclosure comprising culturing the host cell of the disclosure in conditions that the CD3ε binding protein is expressed, and recovering the CD3ε binding protein produced by the host cell. Methods of making proteins and purifying them are known. Once synthesized (either chemically or recombinantly), the CD3ε binding proteins may be purified according to standard procedures, including ammonium sulfate precipitation, affinity columns, column chromatography, high performance liquid chromatography (HPLC) purification, gel electrophoresis, and the like (see generally Scopes, Protein Purification (Springer-Verlag, N.Y., (1982)). A subject protein may be substantially pure, e.g., at least about 80% to 85% pure, at least about 85% to 90% pure, at least about 90% to 95% pure, or at least about 98% to 99%, or more, pure, e.g., free from contaminants such as cell debris, macromolecules, etc. other than the subject protein

[0897] The polynucleotides encoding the CD3ε binding proteins of the disclosure may be incorporated into vectors using standard molecular biology methods. Host cell transformation, culture, antibody expression and purification are done using well known methods.

[0898] Modified nucleotides may be used to generate the polynucleotides of the disclosure. Exemplary modified nucleotides are 5-fluorouracil, 5-bromouracil, 5-chlorouracil, 5-iodouracil, hypoxanthine, xanthine, 4-acetylcytosine, 5-(carboxyhydroxymethyl) uracil, carboxymethylaminomethyl-2-thiouridine, 5-carboxymethylaminomethyluracil, dihydrouracil, N⁶-substituted adenine, 7-methylguanine, 5-methylaminomethyluracil, 5-me thoxyaminomethyl-2-thiouracil, beta-D-mannosylqueosine, 5″-methoxycarboxymethyluracil, 5-methoxyuracil, 2-methylthio-N⁶-isopentenyladenine, uracil-5-oxyacetic acid (v), wybutoxosine, pseudouracil, queuosine, beta-D-galactosylqueosine, inosine, N⁶-isopentenyladenine, 1-methylguanine, 1-methylinosine, 2,2-dimethylguanine, 2-methyladenine, 2-methylguanine, 3-methylcytosine, 5-methylcytosine, 2-thiocytosine, 5-methyl-2-thiouracil, 2-thiouracil, 4-thiouracil, 5-methyluracil, uracil-5-oxyacetic acid methylester, 3-(3-amino-3-N-2-carboxypropyl) uracil, and 2,6-diaminopurine.

### Pharmaceutical Compositions/Administration

[0899] The disclosure also provides a pharmaceutical composition comprising the CD3ε binding protein of the disclosure and a pharmaceutically acceptable carrier.

[0900] The disclosure also provides a pharmaceutical composition comprising the antigen binding domain that binds CD3ε of the disclosure and a pharmaceutically acceptable carrier.

[0901] The disclosure also provides a pharmaceutical composition comprising the protein comprising the antigen binding domain that binds CD3ε of the disclosure and a pharmaceutically acceptable carrier.

[0902] The disclosure also provides a pharmaceutical composition comprising the multispecific protein comprising the antigen binding domain that binds CD3ε of the disclosure and a pharmaceutically acceptable carrier.

[0903] The disclosure also provides a pharmaceutical composition comprising the multispecific protein comprising the antigen binding domain that binds CD3ε and antigen binding domain that binds a tumor antigen of the disclosure and a pharmaceutically acceptable carrier.

[0904] For therapeutic use, the CD3ε binding protein of the disclosure may be prepared as pharmaceutical compositions containing an effective amount of the antibody as an active ingredient in a pharmaceutically acceptable carrier. These solutions are sterile and generally free of particulate matter. They may be sterilized by conventional, well-known sterilization techniques (e.g., filtration). The compositions may contain pharmaceutically acceptable auxiliary substances as required to approximate physiological conditions such as pH adjusting and buffering agents, stabilizing, thickening, lubricating and coloring agents, etc.

[0905] The term “pharmaceutically acceptable,” as used herein with regard to pharmaceutical compositions, means approved by a regulatory agency of the Federal or a state government or listed in the U.S. Pharmacopeia or other generally recognized pharmacopeia for use in animals and/or in humans.

### Methods of Treatment and Uses

[0906] The disclosure also provides the bispecific or multispecific protein comprising a first antigen biding domain that specifically binds CD3ε and a second antigen biding domain that specifically binds a second antigen of the disclosure for use in therapy.

[0907] The disclosure also provides the bispecific or multispecific protein comprising a first antigen biding domain that specifically binds CD3ε and a second antigen biding domain that specifically binds a second antigen of the disclosure for use in treating a cell proliferative disorder.

[0908] The disclosure also provides the bispecific or multispecific protein comprising a first antigen biding domain that specifically binds CD3ε and a second antigen biding domain that specifically binds a second antigen of the disclosure for use in killing cancer cells.

[0909] The disclosure also provides the bispecific or multispecific protein comprising a first antigen biding domain that specifically binds CD3ε and a second antigen biding domain that specifically binds a second antigen of the disclosure for use in the manufacture of a medicament for killing cancer cells.

[0910] The disclosure also provides the bispecific or multispecific protein comprising a first antigen biding domain that specifically binds CD3ε and a second antigen biding domain that specifically binds a second antigen of the disclosure for use in redirection of cytolytic T cells.

[0911] The disclosure also provides the bispecific or multispecific protein comprising a first antigen biding domain that specifically binds CD3ε and a second antigen biding domain that specifically binds a second antigen of the disclosure for use in the manufacture of a medicament for redirection of cytolytic T cells.

[0912] The disclosure also provides the bispecific or multispecific protein comprising a first antigen biding domain that specifically binds CD3ε and a second antigen biding domain that specifically binds a second antigen of the disclosure for use in redirection of cytolytic T cells in the tumor microenviroment.

[0913] The disclosure also provides the bispecific or multispecific protein comprising a first antigen biding domain that specifically binds CD3ε and a second antigen biding domain that specifically binds a second antigen of the disclosure for use in the manufacture of a medicament for redirection of cytolytic T cells in the tumor microenviroment.

[0914] The disclosure also provides the bispecific or multispecific protein comprising a first antigen biding domain that specifically binds CD3ε and a second antigen biding domain that specifically binds a second antigen of the disclosure for use in treating cancer.

[0915] The disclosure also provides the bispecific or multispecific protein comprising a first antigen biding domain that specifically binds CD3ε and a second antigen biding domain that specifically binds a second antigen of the disclosure for use in the manufacture of a medicament for treating cancer.

[0916] In one aspect, the disclosure relates generally to the treatment of a subject at risk of developing cancer. The invention also includes treating a malignancy in which chemotherapy and/or immunotherapy results in significant immunosuppression in a subject, thereby increasing the risk of the subject developing cancer.

[0917] The disclosure also provides a method of treating a noncancerous condition in a subject at risk of developing a cancerous condition, comprising administering the antigen binding domain that bind CD3ε of the disclosure to the subject to treat the noncancerous condition.

[0918] The disclosure also provides a method of treating a noncancerous condition in a subject at risk of developing a cancerous condition, comprising administering the protein comprising the antigen binding domain that bind CD3ε of the disclosure to the subject to treat the noncancerous condition.

[0919] The disclosure also provides a method of treating a noncancerous condition in a subject at risk of developing a cancerous condition, comprising administering the multispecific protein comprising the antigen binding domain that bind CD3ε of the disclosure to the subject to treat the noncancerous condition.

[0920] The disclosure also provides a method of treating a noncancerous condition in a subject at risk of developing a cancerous condition, comprising administering the immunoconjugate of the disclosure to the subject to treat the noncancerous condition.

[0921] The disclosure also provides a method of treating a noncancerous condition in a subject at risk of developing a cancerous condition, comprising administering the pharmaceutical composition of the disclosure to the subject to treat the noncancerous condition.

[0922] The disclosure also provides a method of treating cancer in a subject, comprising administering a therapeutically effective amount of the multispecific protein comprising the antigen binding domain that binds CD3ε to the subject to treat the cancer, wherein the antigen binding domain that bind CD3ε comprises
[0923] the VH of SEQ ID NO: 55 and the VL of SEQ ID NO: 59;
[0924] the VH of SEQ ID NO: 55 and the VL of SEQ ID NO: 58;
[0925] the VH of SEQ ID NO: 54 and the VL of SEQ ID NO: 56;
[0926] the VH of SEQ ID NO: 48 and the VL of SEQ ID NO: 58;
[0927] the VH of SEQ ID NO: 88 and the VL of SEQ ID NO: 58; or
[0928] the VH of SEQ ID NO: 242 and the VL of SEQ ID NO: 58.

[0929] The disclosure also provides a method of treating cancer in a subject, comprising administering a therapeutically effective amount of the multispecific protein comprising the antigen binding domain that binds CD3ε to the subject to treat the cancer, wherein the antigen binding domain that binds CD3ε comprises the amino acid sequence of SEQ ID NOs: 96, 97, 98, 99, 100, 101, 102, 103, 104, 105, 106, 107, 108, 109, 110, 111, 112, 113, 114, 115, 116, 117, 118, 119, 120, 121, 122, 123, 124, 125, or 126.

[0930] A further aspect of the disclosure is a method of treating a cell proliferative disorder in a subject in need thereof, the method comprising administering to the subject a therapeutically effective amount of the bispecific or multispecific protein comprising a first antigen biding domain that specifically binds CD3ε and a second antigen biding domain that specifically binds a second antigen of the disclosure. In other embodiments, the bispecific or multispecific protein comprising a first antigen biding domain that specifically binds CD3ε and a second antigen biding domain that specifically binds a second antigen of the disclosure, is administered to the subject.

[0931] In any of the preceding uses or methods, the cell proliferative disorder is cancer. In other embodiments, the cancer is selected from the group consisting of esophageal cancer, stomach cancer, small intestine cancer, large intestine cancer, colorectal cancer, breast cancer, non-small cell lung cancer, non-Hodgkin's lymphoma (NHL), B cell lymphoma, B cell leukemia, multiple myeloma, renal cancer, prostate cancer, liver cancer, head and neck cancer, melanoma, ovarian cancer, mesothelioma, glioblastoma, germinal-center B-cell-like (GCB) DLBCL, activated B-cell-like (ABC) DLBCL, follicular lymphoma (FL), mantle cell lymphoma (MCL), acute myeloid leukemia (AML), chronic lymphoid leukemia (CLL), marginal zone lymphoma (MZL), small lymphocytic leukemia (SLL), lymphoplasmacytic lymphoma (LL), Waldenstrom macroglobulinemia (WM), central nervous system lymphoma (CNSL), Burkitt's lymphoma (BL), B-cell prolymphocytic leukemia, Splenic marginal zone lymphoma, Hairy cell leukemia, Splenic lymphoma/leukemia, unclassifiable, Splenic diffuse red pulp small B-cell lymphoma, Hairy cell leukemia variant, Waldenstrom macroglobulinemia, Heavy chain diseases, Plasma cell myeloma, Solitary plasmacytoma of bone, Extraosseous plasmacytoma, Extranodal marginal zone lymphoma of mucosa-associated lymphoid tissue (MALT lymphoma), Nodal marginal zone lymphoma, Pediatric nodal marginal zone lymphoma, Pediatric follicular lymphoma, Primary cutaneous follicle centre lymphoma, T-cell/histiocyte rich large B-cell lymphoma, Primary DLBCL of the CNS, Primary cutaneous DLBCL, leg type, EBV-positive DLBCL of the elderly, DLBCL associated with chronic inflammation, Lymphomatoid granulomatosis, Primary mediastinal (thymic) large B-cell lymphoma. Intravascular large B-cell lymphoma, ALK-positive large B-cell lymphoma, Plasmablastic lymphoma, Large B-cell lymphoma arising in HHV8-associated multicentric Castleman disease, Primary effusion lymphoma: B-cell lymphoma, unclassifiable, with features intermediate between diffuse large B-cell lymphoma and Burkitt lymphoma, and B-cell lymphoma, unclassifiable, with features intermediate between diffuse large B-cell lymphoma, classical Hodgkin lymphoma and light chain amyloidosis.

[0932] In other embodiments, the cancer is esophageal cancer. In other embodiments, the cancer is an adenocarcinoma, for example, a metastatic adenocarcinoma (e.g., a colorectal adenocarcinoma, a gastric adenocarcinoma, or a pancreatic adenocarcinoma).

[0933] In another aspect, the disclosure features a kit comprising: (a) a composition comprising any one of the preceding the bispecific or multispecific protein comprising a first antigen biding domain that specifically binds CD3ε and a second antigen biding domain that specifically binds a second antigen of the disclosure and (b) a package insert comprising instructions for administering the composition to a subject to treat or delay progression of a cell proliferative disorder.

[0934] In any of the preceding uses or methods, the subject can be a human.

### Combination Therapies

[0935] The CD3ε binding proteins of the disclosure may be administered in combination with at least one additional therapeutics.

[0936] In other embodiments, the delivery of one treatment is still occurring when the delivery of the second begins, so that there is overlap in terms of administration. This is sometimes referred to herein as “simultaneous” or “concurrent delivery”. In other embodiments, the delivery of one treatment ends before the delivery of the other treatment begins. In some embodiments of either case, the treatment is more effective because of combined administration. For example, the second treatment is more effective, e.g., an equivalent effect is seen with less of the second treatment, or the second treatment reduces symptoms to a greater extent, than would be seen if the second treatment were administered in the absence of the first treatment, or the analogous situation is seen with the first treatment. In other embodiments, delivery is such that the reduction in a symptom, or other parameter related to the disorder is greater than what would be observed with one treatment delivered in the absence of the other. The delivery can be such that an effect of the first treatment delivered is still detectable when the second is delivered.

[0937] The CD3ε binding proteins described herein and the at least one additional therapeutic agent can be administered simultaneously, in the same or in separate compositions, or sequentially. For sequential administration, the CD3ε binding proteins described herein can be administered first, and the additional agent can be administered second, or the order of administration can be reversed.

### Embodiments

[0938] This invention provides the following non-limiting embodiments.
[0939] 1. An isolated protein comprising an antigen binding domain that binds to cluster of differentiation 3ε (CD3ε), wherein the antigen binding domain that binds CD3ε comprises:
   [0940] a. a heavy chain complementarity determining region (HCDR) 1, a HCDR2 and a HCDR3 of a heavy chain variable region (VH) of SEQ ID NO: 55 and a light chain complementarity determining region (LCDR) 1, a LCDR2 and a LCDR3 of a light chain variable region (VL) of SEQ ID NO: 59;
   [0941] b. the HCDR1, the HCDR2 and the HCDR3 of the VH of SEQ ID NO: 55 and the LCDR1, the LCDR2 and the LCDR3 of the VL of SEQ ID NO: 58;
   [0942] c. the HCDR1, the HCDR2 and the HCDR3 of the VH of SEQ ID NO: 54 and the LCDR1, the LCDR2 and the LCDR3 of the VL of SEQ ID NO: 56; or
   [0943] d. the HCDR1, the HCDR2 and the HCDR3 of the VH of SEQ ID NO: 48 and the LCDR1, the LCDR2 and the LCDR3 of the VL of SEQ ID NO: 58;
wherein the amino acid in position N106 of SEQ ID NO: 55, 54, or 48 is optionally substituted with the amino acid selected from the group consisting of A, G, S, F, E, T, R, V, I, Y, L, P, Q, and K, wherein the residue numbering starts from N-terminus of SEQ ID NO: 55, 54, or 48.
[0944] 2. An isolated protein, comprising the HCDR1, the HCDR2, the HCDR3, the LCDR1, the LCDR2 and the LCDR3 of SEQ ID NOs: 70, 71, 86, 79, 80, and 81, respectively.
[0945] 3. The isolated protein of embodiment 1 or 2, comprising the HCDR1, the HCDR2, the HCDR3, the LCDR1, the LCDR2 and the LCDR3 of
   [0946] a. SEQ ID NOs: 70, 71, 72, 79, 80, and 81, respectively;
   [0947] b. SEQ ID NOs: 70, 71, 87, 79, 80, and 81, respectively; or
   [0948] c. SEQ ID NOs: 70, 71, 90, 79, 80, and 81, respectively.
[0949] 4. The isolated protein of embodiments 1-3, wherein the antigen binding domain that binds CD3ε is a scFv, a (scFv)2, a Fv, a Fab, a F(ab′)2, a Fd, a dAb or a VHH.
[0950] 5. The isolated protein of embodiment 4, wherein the antigen binding domain that binds CD3ε is the Fab.
[0951] 6. The isolated protein of embodiment 4, wherein the antigen binding domain that binds CD3ε is the scFv.
[0952] 7. The isolated protein of embodiment 6, wherein the scFv comprises, from the N- to C-terminus, a VH, a first linker (L1) and a VL (VH-L1-VL) or the VL, the L1 and the VH (VL-L1-VH).
[0953] 8. The isolated protein of embodiment 7, wherein the L1 comprises
   [0954] a. about 5-50 amino acids;
   [0955] b. about 5-40 amino acids;
   [0956] c. about 10-30 amino acids; or
   [0957] d. about 10-20 amino acids.
[0958] 9. The isolated protein of embodiment 7, wherein the L1 comprises an amino acid sequence of SEQ ID NOs: 3-36.
[0959] 10. The isolated protein of embodiment 9 wherein the L1 comprises the amino acid sequence of SEQ ID NO: 3.
[0960] 11. The isolated protein of any one of embodiments 1-10, wherein the antigen binding domain that binds CD3ε comprises the VH of SEQ ID NOs: 55, 54, or 48 and the VL of SEQ ID NOs: 59, 58 or 56.
[0961] 12. The isolated protein of embodiment 11, wherein the antigen binding domain that binds CD3ε comprises:
   [0962] a. the VH of SEQ ID NO: 55 and the VL of SEQ ID NO: 59;
   [0963] b. the VH of SEQ ID NO: 55 and the VL of SEQ ID NO: 58;
   [0964] c. the VH of SEQ ID NO: 54 and the VL of SEQ ID NO: 56;
   [0965] d. the VH of SEQ ID NO: 48 and the VL of SEQ ID NO: 58;
   [0966] e. the VH of SEQ ID NO: 88 and the VL of SEQ ID NO: 58; or
   [0967] f. the VH of SEQ ID NO: 242 and the VL of SEQ ID NO: 58.
[0968] 13. The isolated protein of any one of embodiments 1-12, wherein the antigen binding domain that binds CD3ε comprises an amino acid sequence selected from the group consisting of SEQ ID NOs: 96-126.
[0969] 14. The isolated protein of any one of embodiments 1-13, wherein the isolated protein is a multispecific protein.
[0970] 15. The isolated protein of embodiment 14, wherein the multispecific protein is a bispecific protein.
[0971] 16. The isolated protein of embodiment 14, wherein the multispecific protein is a trispecific protein.
[0972] 17. The isolated protein of any one of embodiments 1-16, further comprising an immunoglobulin (Ig) constant region or a fragment of the Ig constant region thereof
[0973] 18. The isolated protein of embodiment 17, wherein the fragment of the Ig constant region comprises a Fc region.
[0974] 19. The isolated protein of embodiment 17, wherein the fragment of the Ig constant region comprises a CH2 domain.
[0975] 20. The isolated protein of embodiment 17, wherein the fragment of the Ig constant region comprises a CH3 domain.
[0976] 21. The isolated protein of embodiment 17, wherein the fragment of the Ig constant region comprises a CH2 domain and a CH3 domain.
[0977] 22. The isolated protein of embodiment 17, wherein the fragment of the Ig constant region comprises at least portion of a hinge, a CH2 domain and a CH3 domain.
[0978] 23. The isolated protein of embodiment 17, wherein the fragment of the Ig constant region comprises a hinge, a CH2 domain and a CH3 domain.
[0979] 24. The isolated protein of any one of embodiments 17-24, wherein the antigen binding domain that binds CD3ε is conjugated to the N-terminus of the Ig constant region or the fragment of the Ig constant region.
[0980] 25. The isolated protein of any one of embodiments 17-24, wherein the antigen binding domain that binds CD3ε is conjugated to the C-terminus of the Ig constant region or the fragment of the Ig constant region.
[0981] 26. The isolated protein of any one of embodiments 17-24, wherein the antigen binding domain that binds CD3ε is conjugated to the Ig constant region or the fragment of the Ig constant region via a second linker (L2).
[0982] 27. The isolated protein of embodiment 35, wherein the L2 comprises the amino acid sequence selected from the group consisting of SEQ ID NOs: 3-36.
[0983] 28. The isolated protein of any one of embodiments 14-27, wherein the multispecific protein comprises an antigen binding domain that binds an antigen other than CD3ε.
[0984] 29. The multispecific antibody of embodiment 14-28, wherein the cell antigen is a tumor associated antigen.
[0985] 30. The isolated protein of any one of embodiments 14-29, wherein the Ig constant region or the fragment of the Ig constant region is an IgG1, an IgG2, an IgG3 or an IgG4 isotype.
[0986] 31. The isolated protein of any one of embodiments 1-30, wherein the Ig constant region or the fragment of the Ig constant region comprises at least one mutation that results in reduced binding of the protein to a Fcγ receptor (FcγR).
[0987] 32. The isolated protein of embodiment 31, wherein the at least one mutation that results in reduced binding of the protein to the FcγR is selected from the group consisting of F234A/L235A, L234A/L235A, L234A/L235A/D265S, V234A/G237A/P238S/H268A/V309L/A330S/P331S, F234A/L235A, S228P/F234A/L235A, N297A, V234A/G237A, K214T/E233P/L234V/L235A/G236-deleted/A327G/P331A/D365E/L358M, H268Q/V309L/A330S/P331S, S267E/L328F, L234F/L235E/D265A, L234A/L235A/G237A/P238S/H268A/A330S/P331S, S228P/F234A/L235A/G237A/P238S and S228P/F234A/L235A/G236-deleted/G237A/P238S, wherein residue numbering is according to the EU index.
[0988] 33. The isolated protein of any one of embodiments 31-32, wherein the FcγR is FcγRI, FcγRIIA, FcγRIIB or FcγRIII, or any combination thereof.
[0989] 34. The isolated protein of any one of the embodiments 14-33, wherein the protein comprises at least one mutation in a CH3 domain of the Ig constant region.
[0990] 35. The isolated protein of embodiment 34, wherein the at least one mutation in the CH3 domain of the Ig constant region is selected from the group consisting of T350V, L351Y, F405A, Y407V, T366Y, T366W, T366L, T366L, F405W, T394W, K392L, T394S, T394W, Y407T, Y407A, T366S/L368A/Y407V, L351Y/F405A/Y407V, T366I/K392M/T394W, F405A/Y407V, T366L/K392M/T394W, T366L/K392L/T394W, L351Y/Y407A, L351Y/Y407V, T366A/K409F, T366V/K409F, T366A/K409F, T350V/L351Y/F405A/Y407V and T350V/T366L/K392L/T394W, wherein residue numbering is according to the EU index.
[0991] 36. A pharmaceutical composition comprising the isolated protein of any one of embodiments 1-35 and a pharmaceutically acceptable carrier.
[0992] 37. A polynucleotide encoding the isolated protein of any one of embodiments 1-35.
[0993] 38. A vector comprising the polynucleotide of embodiment 35.
[0994] 39. A host cell comprising the vector of embodiment 38.
[0995] 40. A method of producing the isolated protein of any one of embodiments 1-35, comprising culturing the host cell of embodiment 39 in conditions that the protein is expressed, and recovering the protein produced by the host cell.
[0996] 41. A method of treating a cancer in a subject, comprising administering a therapeutically effective amount of the isolated protein of any one of embodiments 1-35 to the subject in need thereof to treat the cancer.
[0997] 42. An anti-idiotypic antibody binding to the isolated protein of any one of embodiments 1-35.
[0998] 43. An isolated protein of any one of embodiments 1-35 comprising an amino acid sequence selected from the group consisting of SEQ ID NOs: 127-157.
[0999] 44. An isolated protein of any one of embodiments 1-35 comprising an antibody heavy chain of SEQ ID NO: 224 and antibody light chain of SEQ ID NO: 226.

### EXAMPLES

### Example 1. Generation and Characterization of Anti-CD3 mAbs

[1000] The publicly available mouse Cris7 antibody, specific to human CD3ε (Alberola-Ila, J. et al. Stimulation through the TCR/CD3 complex up-regulates the CD2 surface expression on human T lymphocytes. J Immunol 146, 1085-1092 (1991)) was used for these experimentations. The VH and VL sequences of Cris-7 are shown below.

[1001] Cris-7 VH (SEQ ID NO: 37):

[1002] QVQLQQSGAELARPGASVKMSCKASGYTFTRSTMHWVKQRPGQGLEWIGYINPSSAYT NYNQKFKDKATLTADKSSSTAYMQLSSLTSEDSAVYYCASPQVHYDYNGFPYWGQGTLVTVSA

[1003] Cris-7 VL (SEQ ID NO: 38):

[1004] QVVLTQSPAIMSAFPGEKVTMTCSASSSVSYMNWYQQKSGTSPKRWIYDSSKLASGVPA RFSGSGSGTSYSLTISSMETEDAATYYCQQWSRNPPTFGGGTKLQIT

Humanization and scFv Formatting of CD3 Binding Domains

### Evaluation of Optimal Germline Sequences

[1005] Murine Cris-7 was humanized in the single-chain fragment variable-domain (scFv) format. To find the binding affinity matched to Cris7 and the most thermal-stable combination of human germline acceptor HC and LC pair for scFv format, two human heavy variable-domain (Hv) germline sequences and two human light variable-domain (Lv) germline sequences were selected for the antibody humanization: IGHV1-69*02-IGHJ1-01 and IGHV5-10-1*01-IIGHJ1-01 for Hv and IGKV3-11*02-IGKJ4-01 or the IGKV1-39*01-IGKJ4-01 germline for Lv (Retrieved from the Internet: <URL: http://www.imgt.org/vquest/refseqh.html>). The CDR-grafted sequences were generated with limited back mutations to enhance stability (see Table 4 below). These CDR-grafted v-regions were then expressed in E. coli in scFv format in both the heavy chain-linker-light chain (HL) and in the light chain-linker-heavy chain (LH) orientations. A matrix of Hv and Lv pairings was evaluated in scFv-format in both orientations of Lv followed by Hv or Hv followed by Lv with a flexible linker between these variable domains, as described below. CD3B1127 and CD3B1128 comprised murine VH and VL sequences (Table 4). There were two main conclusions from this experiment. First, in all cases, the Cris-7-derived scFv molecules displayed significantly stronger binding to recombinant CD3 (TRCW5, SEQ ID NO: 39) in the HL orientation compared to the LH orientation, based primarily on higher maximum signal, as determined by ELISA. Second, the IGHV1-69*02-IGHJ1-01 heavy chain germline with IGKV3-11*02-IGKJ4-01 light chain germline grafted construct containing limited back mutations in the heavy-light orientation exhibited the best expression, binding profile, and potential differentiation, and so was chosen for humanization (FIG. 1, Tables 4 and 5).

TABLE 4
Amino acid sequences of grafted sequences, comprising limited back mutations.

| Protein ID | VH | VL | Linker |
|---|---|---|---|
| (orientation) | (SEQ ID NO:) | (SEQ ID NO: ) | (SEQ ID NO:) |
| Cris-7 | QVQLQQSGAELARPGASVKMS | QVVLTQSPAIMSAFPGEKV | GGSEGKSSG |
| | CKASGYTFTRSTMHWVKQRPG | TMTCSASSSVSYMNWYQQ | SGSESKSTG |
| | QGLEWIGYINPS SAYTNYNQKF | KSGTSPKRWIYDSSKLASG | GS |
| | KDKATLTADKSSSTAYMQLSSL | VPARFSGSGSGTSYSLTISS | (3) |
| | TSEDSAVYYCASPQVHYDYNG | METEDAATYYCQQWSRNP | |
| | FPYWGQGTLVTVSA | PTFGGGTKLQIT | |
| | (37) | (38) | |
| CD3B1129 | QVQLVQSGAEVKKPGSSVKVS | DIQLTQSPSSLSASVGDRV | GGSEGKSSG |
| (HL*) | CKASGYTFTRSTMHWVRQAPG | TITCSASSSVSYMNWYQQ | SGSESKSTG |
| | QGLEWMGYINPSSAYTNYNQK | KPGTSPKRLIYDSSKLASG | GS |
| | FQGRVTLTADKSTSTAYMELSS | VPSRFSGSGSGTDYTLTISS | (3) |
| | LRSEDTAVYYCARPQVHYDYN | LQPEDFATYYCQQWSRNP | |
| | GFPYWGQGTLVTVSS | PTFGGGTKVEIK | |
| | (40) | (42) | |
| CD3B1130 | QVQLVQSGAEVKKPGSSVKVS | EIVLTQSPATLSLSPGERAT | GGSEGKSSG |
| (HL) | CKASGYTFTRSTMHWVRQAPG | LSCSASSSVSYMNWYQQK | SGSESKSTG |
| | QGLEWMGYINPSSAYTNYNQK | PGTSPRRLIYDSSKLASGIP | GS |
| | FQGRVTLTADKSTSTAYMELSS | ARFSGSGSGRDYTLTISSLE | (3) |
| | LRSEDTAVYYCARPQVHYDYN | PEDFAVYYCQQWSRNPPT | |
| | GFPYWGQGTLVTVSS | FGGGTKVEIK | |
| | (40) | (43) | |
| CD3B1131 | EVQLVQSGAEVKKPGESLRISC | DIQLTQSPSSLSASVGDRV | GGSEGKSSG |
| (HL) | KASGYTFTRSTMHWVRQMPG | TITCSASSSVSYMNWYQQ | SGSESKSTG |
| | KGLEWMGYINPSSAYTNYNPSF | KPGTSPKRLIYDSSKLASG | GS |
| | QGHVTLSADKSISTAYLQWSSL | VPSRFSGSGSGTDYTLTISS | (3) |
| | KASDTAMYYCARPQVHYDYN | LQPEDFATYYCQQWSRNP | |
| | GFPYWGQGTLVTVSS | PTFGGGTKVEIK | |
| | (41) | (42) | |
| CD3B1132 | EVQLVQSGAEVKKPGESLRISC | EIVLTQSPATLSLSPGERAT | GGSEGKSSG |
| (HL) | KASGYTFTRSTMHWVRQMPG | LSCSASSSVSYMNWYQQK | SGSESKSTG |
| | KGLEWMGYINPSSAYTNYNPSF | PGTSPRRLIYDSSKLASGIP | GS |
| | QGHVTLSADKSISTAYLQWSSL | ARFSGSGSGRDYTLTISSLE | (3) |
| | KASDTAMYYCARPQVHYDYN | PEDFAVYYCQQWSRNPPT | |
| | GFPYWGQGTLVTVSS | FGGGTKVEIK | |
| | (41) | (43) | |
| CD3B1133 | QVQLVQSGAEVKKPGSSVKVS | DIQLTQSPSSLSASVGDRV | GGSEGKSSG |
| (LH) | CKASGYTFTRSTMHWVRQAPG | TITCSASSSVSYMNWYQQ | SGSESKSTG |
| | QGLEWMGYINPSSAYTNYNQK | KPGTSPKRLIYDSSKLASG | GS |
| | FQGRVTLTADKSTSTAYMELSS | VPSRFSGSGSGTDYTLTISS | (3) |
| | LRSEDTAVYYCARPQVHYDYN | LQPEDFATYYCQQWSRNP | |
| | GFPYWGQGTLVTVSS | PTFGGGTKVEIK | |
| | (40) | (42) | |
| CD3B1134 | EVQLVQSGAEVKKPGESLRISC | DIQLTQSPSSLSASVGDRV | GGSEGKSSG |
| (LH) | KASGYTFTRSTMHWVRQMPG | TITCSASSSVSYMNWYQQ | SGSESKSTG |
| | KGLEWMGYINPSSAYTNYNPSF | KPGTSPKRLIYDSSKLASG | GS |
| | QGHVTLSADKSISTAYLQWSSL | VPSRFSGSGSGTDYTLTISS | (3) |
| | KASDTAMYYCARPQVHYDYN | LQPEDFATYYCQQWSRNP | |
| | GFPYWGQGTLVTVSS | PTFGGGTKVEIK | |
| | (41) | (42) | |
| CD3B1135 | QVQLVQSGAEVKKPGSSVKVS | EIVLTQSPATLSLSPGERAT | GGSEGKSSG |
| (LH) | CKASGYTFTRSTMHWVRQAPG | LSCSASSSVSYMNWYQQK | SGSESKSTG |
| | QGLEWMGYINPSSAYTNYNQK | PGTSPRRLIYDSSKLASGIP | GS |
| | FQGRVTLTADKSTSTAYMELSS | ARFSGSGSGRDYTLTISSLE | (3) |
| | LRSEDTAVYYCARPQVHYDYN | PEDFAVYYCQQWSRNPPT | |
| | GFPYWGQGTLVTVSS | FGGGTKVEIK | |
| | (40) | (43) | |
| CD3B1136 | EVQLVQSGAEVKKPGESLRISC | EIVLTQSPATLSLSPGERAT | GGSEGKSSG |
| (LH) | KASGYTFTRSTMHWVRQMPG | LSCSASSSVSYMNWYQQK | SGSESKSTG |
| | KGLEWMGYINPSSAYTNYNPSF | PGTSPRRLIYDSSKLASGIP | GS |
| | QGHVTLSADKSISTAYLQWSSL | ARFSGSGSGRDYTLTISSLE | (3) |
| | KASDTAMYYCARPQVHYDYN | PEDFAVYYCQQWSRNPPT | |
| | GFPYWGQGTLVTVS S | FGGGTKVEIK | |
| | (41) | (43) | |
| CD3B1127 | QVQLQQSGAELARPGASVKMS | QVVLTQSPAIMSAFPGEKV | GGSEGKSSG |
| (HL) | CKASGYTFTRSTMHWVKQRPG | TMTCSASSSVSYMNWYQQ | SGSESKSTG |
| | QGLEWIGYINPS SAYTNYNQKF | KSGTSPKRWIYDSSKLASG | GS |
| | KDKATLTADKSSSTAYMQLSSL | VPARFSGSGSGTSYSLTISS | (3) |
| | TSEDSAVYYCASPQVHYDYNG | METEDAATYYCQQWSRNP | |
| | FPYWGQGTLVTVSA | PTFGGGTKLQIT | |
| | (37) | (38) | |
| CD3B1128 | QVQLQQSGAELARPGASVKMS | QVVLTQSPAIMSAFPGEKV | GGSEGKSSG |
| (LH) | CKASGYTFTRSTMHWVKQRPG | TMTCSASSSVSYMNWYQQ | SGSESKSTG |
| | QGLEWIGYINPS SAYTNYNQKF | KSGTSPKRWIYDSSKLASG | GS |
| | KDKATLTADKSSSTAYMQLSSL | VPARFSGSGSGTSYSLTISS | (3) |
| | TSEDSAVYYCASPQVHYDYNG | METEDAATYYCQQWSRNP | |
| | FPYWGQGTLVTVSA | PTFGGGTKLQIT | |
| | (37) | (38) | |

*HL-VH-Lin ker-VL; LH-VL-Linker-VH

TABLE 5
EC50 (nM) for binding of the CD3-specific variants to
recombinant CD3, using ELISA.

| Protein | EC50 |
|---|---|
| CD3B1129 | 0.7124 |
| CD3B1130 | 0.7465 |
| CD381131 | 1.137 |
| CD3B1132 | ~1.101 |
| CD3B1133 | 0.9583 |
| CD3B1134 | ~0.006296 |
| CD3B1135 | 1.036 |
| CD3B1136 | |
| CD3B1127 | ~0.3972 |
| CD3B1128 | ~0.4369 |
| F5 HL | ~0.005701 |
| Media | |

### Human Framework Optimization in the IGHV1-69*02-IGHJ1-01 and IGKV3-11*02-IGKJ4-01 Germline

[1006] Since the IGHV1-69*02-IGHJ1-01 and IGKV3-11*02-IGKJ4-01 germline grafted sequences (CD3B1130) displayed enhanced binding compared to the murine parents and represented the human germline most similar to the murine parent, as described above, human framework adaptation was performed starting from this CDR-grafted sequence. Starting from this sequence, several sites in the VH were selected which may influence stability of the molecule were identified and were thus selected for library-based mouse back-mutagenesis (Table 6). In one VH library, 4 sites (M48I, A60N, V67A, and I69L—Kabat numbering) were mutated in binary libraries and R94 (Kabat numbering) was mutated to S, V, L, K, T, R, I, or Y for a total of 128 variants. In a second library, 9 sites (K12A, V20M, R38K, M48I, A60N, R66, V67A, I69L, and R94S—Kabat numbering) were mutated in a binary library for a total of 512 variants. These methods are known in the art and is described, for example, in Chiu et al., Antibodies 2019, 8, 55.

TABLE 6
Murine Cris-7, human Germline VH sequences used for humanization,
and position of binary and mutated residues.

| Name | VH |
|---|---|
| Cris-7 VH | QVQLQQSGAELARPGASVKMSCKASGYTFTRSTMHWVKQRPGQG |
| | LEWIGYINPSSAYTNYNQKFKDKATLTADKSSSTAYMQLSSLTSED |
| | SAVYYCA [symbol] PQVHYDYNGFPYWGQGTLVTVSA |
| | (SEQ ID NO: 37) |
| IGHV1-69*02-IGHJ1- | QVQLVQSGAEVKKPGSSVKVSCKASGGTFSSYTISWVRQAPGQGLE |
| 01 | WMGRIIPILGIANYAQKFQGRVTITADKSTSTAYMELSSLRSEDTAV |
| Library 1 | YYCA [symbol] xxxWGQGTTVTVSS |
| | (SEQ ID NO: 44) |
| IGHV1-69*02-IGHJ1- | QVQLVQSGAEVKKPGSSVKVSCKASGGTFSSYTISWVRQAPGQGLE |
| 01 | WMGRIIPILGIANYAQKFQGRVTITADKSTSTAYMELSSLRSEDTAV |
| Library 2 | YYCA [symbol] xxxWGQGTTVTVSS |
| | (SEQ ID NO: 45) |

[1007] Analogously, two libraries were generated for the VL sequence, by identifying sites which may influence stability of the molecule. In library 1, no changes were made to the LC. In library 2, 11 sites were selected for mouse back-mutagenesis in binary fashion (L11M, L13A, A19V, L21M, Q42T, A43S, L46R, L47W, I58V, F71Y, and L78M) for a total of 2048 variants (Table 7).

TABLE 7
Murine Cris-7, human Germline VL sequences used for humanization,
and position of binary and mutated residues.

| Name | VL |
|---|---|
| Cris-7 VL | QVVLTQSPAIMSAFPGEKVTMTCSASSSVSYMNWYQQKSGTSPKR |
| | WIYDSSKLASGVPARFSGSGSGTSYSLTISSMETEDAATYYCQQWS |
| | RNPPTFGGGTKLQIT |
| | (SEQ ID NO: 38) |
| IGKV3-11*02-IGKJ4- | EIVLTQSPATLSLSPGERATLSCRASQSVSSYLAWYQQKPGQAPRLL |
| 01 | IYDASNRATGIPARFSGSGSGRDFTLTISSLEPEDFAVYYCQQRSNWP |
| Library 1 | XXXFGGGTKVEIK |
| | (SEQ ID NO: 46) |
| IGKV3-11*02-IGKJ4- | EIVLTQSPATLSLSPGERATLSCRASQSVSSYLAWYQQKPGQAPRL |
| 01 | LIYDASNRATGIPARFSGSGSGRDFTLTISSLEPEDFAVYYCQQRSN |
| Library 2 | WPXXXFGGGTKVEIK |
| | (SEQ ID NO: 47) |

[1008] Back mutation libraries were created through molecular biology techniques known in the art (Thomas S., et al. DNA library construction using Gibson Assembly®. Nat Methods, p.i-ii November 2015). Different acceptor germlines were paired with the opposite murine parent chain. In this manner, only one chain was human framework adapted with potential back mutations at a single time.

[1009] Briefly, DNA was transformed into an E. coli expression vector to generate scFv molecules having a C-terminal HA-tag, and cells were plated on 2×YT/Carb/2% Glucose grown overnight at 37 C. Colonies were picked and transferred 50ul of overnight growth cultures to new plates containing 500ul of 2×YT/Carb/0.1% Glucose, grown for 6-7 hr, and combined with 50ul 2×YT medium containing 1× carbenicillin & 12×IPTG. Cultures were incubated with shaking ˜600 RPM 30° C. overnight. Streptavidin coated plates were bound with 50 uL of biotinylated TRCW5 antigen (CD3δε-Fc-Avi, SEQ ID NO: 39) at the concentrations indicated in the ELISA graph for 45 min at room temperature with shaking (FIG. 1, FIG. 3, FIG. 4) followed by washing 3× with 1×TBST. Plates were blocked with 200 ul 3% Milk in 1×TBST for ˜45 mins at room temperature followed by washing 3× with 1×TBST. E. coli cultures were harvested by centrifugation at 35000 RPMs for 10 mins 4° C. and 50 uL of supernatant was transferred into CD3-coated plates followed by incubation at 4 C for 45 min. Plates were washed 3× with 1×TBST. Bound scFv was detected with Chicken Polyclonal Anti-HA-HRP (ab1190) [1:1000] for ˜45 mins RT and luminescence detected with chemi-luminescent substrate.

TRCW5 antigen
(CD3δϵ-Fc-Avi, SEQ ID NO: 39)
FKIPIEELEDRVFVNCNTSITWVEGTVGTLLSDITRLDLGKRILDPRGI
YRCNGTDIYKDKESTVQVHYRMGSADDAKKDAAKKDDAKKDDAKKDGSD
GNEEMGGITQTPYKVSISGTTVILTCPQYPGSEILWQHNDKNIGGDEDD
KNIGSDEDHLSLKEFSELEQSGYYVCYPRGSKPEDANFYLYLRARVSPP
SPAPELLGGPSVFLFPPKPKDTLMISRTPEVTCVVVDVSHEDPEVKFNW
YVDGVEVHNAKTKPREEQYNSTYRVVSVLTVLHQDWLNGKEYKCKVSNK
ALPAPIEKTISKAKGQPREPQVYTLPPSRDELTKNQVSLTCLVKGFYPS
DIAVEWESNGQPENNYKTTPPVLDSDGSFFLYSKLTVDKSRWQQGNVFS
CSVMHEALHNHYTQKSLSLSPGKGGGLNDIFEAQKIEWHE

[1010] Clones exhibiting binding greater than the murine parent were selected for sequencing and exposure to titration and thermal stressing ELISA assays. Briefly, scFv were expressed as above and subjected to thermal stress (60° C. heat shock for ˜10 min) followed by ELISA analysis, as described above. Briefly, the clones containing the different combinations of mouse back-mutations that displayed binding from E. coli supernatant were sequenced to determine which residue at each site (either human or mouse germline residue) was more optimal to maintain thermal stability. The proportion of clones harboring each residue at each site were determined (FIGS. 2A and 2B). From the two heavy chain libraries designed, 8 human adapted heavy chain sequences were selected and, from the single light chain library designed, 8 human adapted light chains were selected based on retention of >70% binding (compared to room temperature ELISA binding) after thermal stress. Sequences of the thermally stable humanized Cris-7 VH and VL are shown below (Table 8).

TABLE 8
Sequences of thermally stable humanized Cris-7 VH and VL

| VH | | SEQ ID |
|---|---|---|
| Variant | VH Sequence | NO: |
| VD | QVQLVQSGAEVKKPGSSVKVSCKASGYTFTRSTMHWVRQAPGQGL | 48 |
| 000043392 | EWMGYINPSSAYTNYAQKFQGRVTLTADKSTSTAYMELSSLRSEDT | |
| | AVYYCASPQVHYDYNGFPYWGQGTLVTVSS | |
| VD | QVQLVQSGAEVKKPGSSVKVSCKASGYTFTRSTMHWVRQAPGQGL | 49 |
| 000043400 | EWIGYINPSSAYTNYAQKFQGRVTLTADKSTSTAYMELSSLRSEDTA | |
| | VYYCASPQVHYDYNGFPYWGQGTLVTVSS | |
| VD | QVQLVQSGAEVKKPGSSVKVSCKASGYTFTRSTMHWVRQAPGQGL | 50 |
| 000043401 | EWMGYINPSSAYTNYNQKFQGRVTLTADKSTSTAYMELSSLRSEDT | |
| | AVYYCASPQVHYDYNGFPYWGQGTLVTVSS | |
| VD | QVQLVQSGAEVKKPGSSVKVSCKASGYTFTRSTMHWVRQAPGQGL | 51 |
| 000043403 | EWIGYINPSSAYTNYNQKFQGRVTLTADKSTSTAYMELSSLRSEDTA | |
| | VYYCASPQVHYDYNGFPYWGQGTLVTVSS | |
| VD | QVQLVQSGAEVKKPGSSVKVSCKASGYTFTRSTMHWVKQAPGQGL | 52 |
| 000043404 | EWMGYINPSSAYTNYAQKFQGRVTLTADKSTSTAYMELSSLRSEDT | |
| | AVYYCASPQVHYDYNGFPYWGQGTLVTVSS | |
| VD | QVQLVQSGAEVKKPGSSVKVSCKASGYTFTRSTMHWVKQAPGQGL | 53 |
| 000043402 | EWIGYINPSSAYTNYAQKFQGRVTLTADKSTSTAYMELSSLRSEDTA | |
| | VYYCASPQVHYDYNGFPYWGQGTLVTVSS | |
| VD | QVQLVQSGAEVKKPGSSVKVSCKASGYTFTRSTMHWVKQAPGQGL | 54 |
| 000043405 | EWMGYINPSSAYTNYNQKFQGRVTLTADKSTSTAYMELSSLRSEDT | |
| | AVYYCASPQVHYDYNGFPYWGQGTLVTVSS | |
| VD | QVQLVQSGAEVKKPGSSVKVSCKASGYTFTRSTMHWVKQAPGQGL | 55 |
| 000043406 | EWIGYINPSSAYTNYNQKFQGRVTLTADKSTSTAYMELSSLRSEDTA | |
| | VYYCASPQVHYDYNGFPYWGQGTLVTVSS | |
| VL | | |
| Variant | VL Sequence | |
| VD | EIVLTQSPATLSASPGERVTLSCSASSSVSYMNWYQQKPGQAPRRLI | 56 |
| 000043397 | YDSSKLASGVPARFSGSGSGRDYTLTISSLEPEDFAVYYCQQWSRNP | |
| | PTFGGGTKVEIK | |
| VD | EIVLTQSPATLSASPGERVTLSCSASSSVSYMNWYQQKPGQSPRRLI | 57 |
| 000043398 | YDSSKLASGVPARFSGSGSGRDYTLTISSLEPEDFAVYYCQQWSRNP | |
| | PTFGGGTKVEIK | |
| VD | EIVLTQSPATLSASPGERVTLSCSASSSVSYMNWYQQKPGQAPRRWI | 58 |
| 000043391 | YDSSKLASGVPARFSGSGSGRDYTLTISSLEPEDFAVYYCQQWSRNP | |
| | PTFGGGTKVEIK | |
| VD | EIVLTQSPATLSASPGERVTLSCSASSSVSYMNWYQQKPGQSPRRWI | 59 |
| 000043393 | YDSSKLASGVPARFSGSGSGRDYTLTISSLEPEDFAVYYCQQWSRNP | |
| | PTFGGGTKVEIK | |
| VD | EIVLTQSPATLSASPGERVTLSCSASSSVSYMNWYQQKPGTAPRRLI | 60 |
| 000043394 | YDSSKLASGVPARFSGSGSGRDYTLTISSLEPEDFAVYYCQQWSRNP | |
| | PTFGGGTKVEIK | |
| VD | EIVLTQSPATLSASPGERVTLSCSASSSVSYMNWYQQKPGTSPRRLIY | 61 |
| 000043395 | DSSKLASGVPARFSGSGSGRDYTLTISSLEPEDFAVYYCQQWSRNPP | |
| | TFGGGTKVEIK | |
| VD | EIVLTQSPATLSASPGERVTLSCSASSSVSYMNWYQQKPGTAPRRWI | 62 |
| 000043396 | YDSSKLASGVPARFSGSGSGRDYTLTISSLEPEDFAVYYCQQWSRNP | |
| | PTFGGGTKVEIK | |
| VD | EIVLTQSPATLSASPGERVTLSCSASSSVSYMNWYQQKPGTSPRRWI | 63 |
| 000043399 | YDSSKLASGVPARFSGSGSGRDYTLTISSLEPEDFAVYYCQQWSRNP | |
| | PTFGGGTKVEIK | |

[1011] The 8 new heavy chains and 8 new light chains (shown in Table 8) were again matrixed with each other to generate scFvs (Table 9) and further exposed to additional assays including titration, thermal stress, and cell binding (FIG. 3).

TABLE 9
Protein identities of matrixed thermally stable variable domains

| | VL | | | | | | | |
|---|---|---|---|---|---|---|---|---|
| VH | VD000043397 | VD000043398 | VD000043391 | VD000043393 | VD000043394 | VD000043395 | VD000043396 | VD000043399 |
| VD000043392 | CD3B2084 | CD3B2083 | CD3B2089 | CD3B2088 | CD3B2087 | CD3B2086 | CD3B2085 | CD3B2082 |
| VD000043400 | CD3B2076 | CD3B2075 | CD3B2081 | CD3B2080 | CD3B2079 | CD3B2078 | CD3B2077 | CD3B2074 |
| VD000043401 | CD3B2068 | CD3B2067 | CD3B2073 | CD3B2072 | CD3B2071 | CD3B2070 | CD3B2069 | CD3B2066 |
| VD000043403 | CD3B2057 | CD3B2056 | CD3B2045 | CD3B2044 | CD3B2043 | CD3B2042 | CD3B2041 | CD3B2055 |
| VD000043404 | CD3B2054 | CD3B2053 | CD3B2040 | CD3B2039 | CD3B2038 | CD3B2037 | CD3B2036 | CD3B2052 |
| VD000043402 | CD3B2060 | CD3B2059 | CD3B2065 | CD3B2064 | CD3B2063 | CD3B2062 | CD3B2061 | CD3B2058 |
| VD000043405 | CD3B2051 | CD3B2050 | CD3B2035 | CD3B2034 | CD3B2033 | CD3B2032 | CD3B2031 | CD3B2049 |
| VD000043406 | CD3B2048 | CD3B2047 | CD3B2030 | CD3B2029 | CD3B2028 | CD3B2027 | CD3B2026 | CD3B2046 |

[1012] Cell binding was performed against Pan T-cells (Biological Specialty Corp, Item #215-02-11) and Jurkat-CD3-negative cells (ATCC® TIB-153™) to observe an increase in non-specific binding when thermally stressed. Molecules exhibiting an increase in binding to the negative cell line when thermally stressed were not chosen for additional characterization. ELISA assays for binding to recombinant CD3 (TRCW5, SEQ ID NO: 39) were performed as above. Cell binding was performed using primary human T cell and Jurkat cells by flow cytometry. Briefly, E. coli expressed anti CD3 ScFv supernatants, either at room temperature, or 55° C., 60° C. or 65° C. heat treated samples.

[1013] Pan T-cells (CD3-positive) and Jurkat-CD3-negative cells were prepared by staining Jurkat-CD3-negative cells with CFSE while keeping pan T-cells unstained. Jurkat-CD3-negative cell suspensions were resuspended at 20 million cells per each 50 mL conical tube. Cells were harvested by centrifugation at 400×g for 5 minutes and resuspended in DPBS followed by washing 2× in DPBS. Cells were stained with 1:25,000 dilution for a final dye concentration of 0.02 uM CFSE (2 uL of staining solution to 50 mL of cell suspension). Cells were incubated for 10 minutes at room temperature and centrifuged for 5 minutes at 400×g. After removal of supernatant, 3 mL of HI-FBS were added to the cell pellet, mixed and centrifuged for 5 min at 400×g. Supernatant was removed and cells were resuspended in BD stain buffer at 2×10\hat{ }6 cells/mL and incubated on ice or 4 C protected from light. Human pan T cells were thawed at 37 C and transferred gently into a conical tube containing 15 mL of warm or RT culture media (RPMI+10% FBS). T-cells from Donor ID #M7348; Lot #LS 11 62980A were at 97.2% viability. Cells were harvested by centrifugation at 400×g for 5 min and resuspended in culture media (RPMI+10% HI-FBS). Pan T-cells (without staining) were prepared at 2×10\hat{ }6 cells/mL in flow staining buffer. Equal volumes of CFSE stained Jurkat-CD3-negative cells and unstained T-cells (CD3-positive) cells were mixed and plated 50 uL/well into assay plates. 50 uL/well neat bacterial supernatant samples and control sample (CD3W36 ScFv) were added to each well and plates were incubated 1 hr at 4 C or. Cells were harvested by centrifugation at 400×g for 4 min and 150 uL staining buffer were added to all wells, followed by centrifugation at 400×g for 4 min to pellet cells. To each well, 150 uL staining buffer were added followed by centrifugation at 400×g for 4 minutes to pellet cells. A647 conjugated anti-HIS secondary antibody was prepared at 2 ug/mL (1:100 dilution from stock vial) in staining buffer and added at 50 uL/well to the washed cells followed by incubation for 30 min at 4 C protected from light. Then 150 uL staining buffer were added to all wells, and plates were spun at 400×g for 4 minutes to pellet cells. 150 uL IntelliCyt running buffer were added to all wells, and plates were spun at 400×g for 4 minutes to pellet cells. Cells were resuspended in 20-30 uL running buffer containing 1:1000 dilution of Sytox Blue dead cell stain and run plates on iQue Screener. Briefly, cells were gated on FCS v. SCS to eliminate debris. Singlets were gated on SCS-A vs SCS-H and, separated and gated cells first on BL1 channel based on CFSE staining, then on VL1 channel with low/negative with Sytox blue viability stain for gating live cells. Binding of scFv molecules was assessed by Geomeans on RL1 channel from the live cell population. Data were analyzed in GraphPad Prism. Ultimately, four humanized matrixed clones exhibited the most desired properties: having retained binding after 65° C. heat shock and were selected. These clones were noted as CD3B2029, CD3B2030, CD3B2051, and CD3B2089.

[1014] Tables 10, 11, and 12 show amino acid, DNA, and CDR sequences of VH and VL for CD3B2029, CD3B2030, CD3B2051, and CD3B2089.

[1015] Table 13 shows thermal stability ELISA binding to recombinant CD3 (TRCW5, SEQ ID NO: 39) data for all the clones tested from Table 9.

[1016] Table 14 shows cell stability ELISA binding data for select clones.

TABLE 10
VH and VL amino acid sequences of CD3B2029, CD3B2030, CD3B2051, and CD3B2089.

| Binding | | VH | | VL |
|---|---|---|---|---|
| domain | | SEQ ID | | SEQ ID |
| name | VH amino acid Sequence | NO: | VL amino acid sequence | NO: |
| CD3B2029 | QVQLVQSGAEVKKPGSSVK | 55 | EIVLTQSPATLSASPGERVT | 59 |
| | VSCKASGYTFTRSTMHWV | | LSCSASSSVSYMNWYQQK | |
| | KQAPGQGLEWIGYINPSSA | | PGQSPRRWIYDSSKLASGV | |
| | YTNYNQKFQGRVTLTADKS | | PARFSGSGSGRDYTLTISSL | |
| | TSTAYMELSSLRSEDTAVY | | EPEDFAVYYCQQWSRNPP | |
| | YCASPQVHYDYNGFPYWG | | TFGGGTKVEIK | |
| | QGTLVTVSS | | | |
| CD3B2030 | QVQLVQSGAEVKKPGSSVK | 55 | EIVLTQSPATLSASPGERVT | 58 |
| | VSCKASGYTFTRSTMHWV | | LSCSASSSVSYMNWYQQK | |
| | KQAPGQGLEWIGYINPSSA | | PGQAPRRWIYDSSKLASGV | |
| | YTNYNQKFQGRVTLTADKS | | PARFSGSGSGRDYTLTISSL | |
| | TSTAYMELSSLRSEDTAVY | | EPEDFAVYYCQQWSRNPP | |
| | YCASPQVHYDYNGFPYWG | | TFGGGTKVEIK | |
| | QGTLVTVSS | | | |
| CD3B2051 | QVQLVQSGAEVKKPGSSVK | 54 | EIVLTQSPATLSASPGERVT | 56 |
| | VSCKASGYTFTRSTMHWV | | LSCSASSSVSYMNWYQQK | |
| | KQAPGQGLEWMGYINPSSA | | PGQAPRRLIYDSSKLASGV | |
| | YTNYNQKFQGRVTLTADKS | | PARFSGSGSGRDYTLTISSL | |
| | TSTAYMELSSLRSEDTAVY | | EPEDFAVYYCQQWSRNPP | |
| | YCASPQVHYDYNGFPYWG | | TFGGGTKVEIK | |
| | QGTLVTVSS | | | |
| CD3B2089 | QVQLVQSGAEVKKPGSSVK | 48 | EIVLTQSPATLSASPGERVT | 58 |
| | VSCKASGYTFTRSTMHWVR | | LSCSASSSVSYMNWYQQK | |
| | QAPGQGLEWMGYINPSSAY | | PGQAPRRWIYDSSKLASGV | |
| | TNYAQKFQGRVTLTADKST | | PARFSGSGSGRDYTLTISSL | |
| | STAYMELSSLRSEDTAVYY | | EPEDFAVYYCQQWSRNPP | |
| | CASPQVHYDYNGFPYWGQ | | TFGGGTKVEIK | |
| | GTLVTVSS | | | |

TABLE 11
VH and VL DNA sequences of CD3B2029, CD3B2030, CD3B2051, and CD3B2089.

| Binding | | VH | | VL |
|---|---|---|---|---|
| domain | | SEQ ID | | SEQ ID |
| name | VH DNA Sequence | NO: | VL DNA sequence | NO: |
| CD3B2029 | caggttcagctggttcagtctggcgccgaa | 64 | gagatcgtgctgacccagtctcctgccac | 67 |
| | gtgaagaaacctggctcctccgtcaaggtg | | actgtcagcctctccaggcgagagagtca | |
| | tcctgcaaggcttccggctacacctttacca | | ccctgtcctgctccgcttcctcctccgtgtc | |
| | gatccaccatgcactgggtcaaacaggctc | | ctacatgaactggtatcagcagaagcccg | |
| | caggacaaggcttggagtggatcggctac | | gccagtctcctagacggtggatctacgac | |
| | atcaaccccagctccgcctacaccaactac | | tcctccaagctggcctctggcgtccctgc | |
| | aaccagaaattccagggcagagtcaccctc | | ccgcttttccggctctgggtctggcagag | |
| | accgccgacaagtctacctccaccgcctac | | actataccctgaccatctccagcctggaa | |
| | atggaactgtccagcctgagatctgaggac | | cctgaggacttcgccgtgtactactgcca | |
| | accgccgtgtactactgcgccagccctcag | | gcagtggtctagaaaccctcctacctttgg | |
| | gtgcactacgactacaacggcttcccttatt | | cggaggcaccaaggtggaaatcaag | |
| | ggggccagggcaccctggttaccgtttctt | | | |
| | ct | | | |
| CD3B2030 | caggttcagctggttcagtctggcgccgaa | 64 | gagatcgtgctgacccagtctcctgccac | 68 |
| | gtgaagaaacctggctcctccgtcaaggtg | | actgtcagcctctccaggcgagagagtca | |
| | tcctgcaaggcttccggctacacctttacca | | ccctgtcctgctccgcttcctcctccgtgtc | |
| | gatccaccatgcactgggtcaaacaggctc | | ctacatgaactggtatcagcagaagcccg | |
| | caggacaaggcttggagtggatcggctac | | gccaggctcctagacggtggatctacga | |
| | atcaaccccagctccgcctacaccaactac | | ctcctccaagctggcctctggcgtccctg | |
| | aaccagaaattccagggcagagtcaccctc | | cccgcttttccggctctggctctggcagag | |
| | accgccgacaagtctacctccaccgcctac | | actataccctgaccatctccagcctggaa | |
| | atggaactgtccagcctgagatctgaggac | | cctgaggacttcgccgtgtactactgcca | |
| | accgccgtgtactactgcgccagccctcag | | gcagtggtctagaaaccctcctacctttgg | |
| | gtgcactacgactacaacggcttcccttatt | | cggaggcaccaaggtggaaatcaag | |
| | ggggccagggcaccctggttaccgtttctt | | | |
| | ct | | | |
| CD3B2051 | caggttcagctggttcagtctggcgccgaa | 65 | gagatcgtgctgacccagtctcctgccac | 69 |
| | gtgaagaaacctggctcctccgtcaaggtg | | actgtcagcctctccaggcgagagagtca | |
| | tcctgcaaggcttccggctacacctttacca | | ccctgtcctgctccgcttcctcctccgtgtc | |
| | gatccaccatgcactgggtcaaacaggctc | | ctacatgaactggtatcagcagaagcccg | |
| | caggacaaggcttggagtggatgggctac | | gccaggctcctagacggctgatctacgac | |
| | atcaaccccagctccgcctacaccaactac | | tcctccaagctggcctctggcgtccctgc | |
| | aaccagaaattccagggcagagtcaccctc | | ccgcttttccggctctgggtctggcagag | |
| | accgccgacaagtctacctccaccgcctac | | actataccctgaccatctccagcctggaa | |
| | atggaactgtccagcctgagatctgaggac | | cctgaggacttcgccgtgtactactgcca | |
| | accgccgtgtactactgcgccagccctcag | | gcagtggtctagaaaccctcctacctttgg | |
| | | | cggaggcaccaaggtggaaatcaag | |
| | | | gttcactacgactacaacggcttcccttattg | |
| | | | gggccagggcaccctggttaccgtttcttct | |
| CD3B2089 | caggttcagctggttcagtctggcgccgaa | 66 | gagatcgtgctgacccagtctcctgccac | 68 |
| | gtgaagaaacctggctcctccgtcaaggtg | | actgtcagcctctccaggcgagagagtca | |
| | tcctgcaaggcttccggctacacctttacca | | ccctgtcctgctccgcttcctcctccgtgtc | |
| | gatccaccatgcactgggtccgacaggctc | | ctacatgaactggtatcagcagaagcccg | |
| | caggccaaggcttggagtggatgggctac | | gccaggctcctagacggtggatctacga | |
| | atcaaccccagctccgcctacaccaactac | | ctcctccaagctggcctctggcgtccctg | |
| | gcccagaaattccagggcagagtcaccct | | cccgcttttccggctctggctctggcagag | |
| | caccgccgacaagtctacctccaccgccta | | actataccctgaccatctccagcctggaa | |
| | catggaactgtccagcctgagatctgagga | | cctgaggacttcgccgtgtactactgcca | |
| | caccgccgtgtactactgcgccagccctca | | gcagtggtctagaaaccctcctacctttgg | |
| | ggtgcactacgactacaacggcttcccttat | | cggaggcaccaaggtggaaatcaag | |
| | tggggccagggcaccctggttaccgtttctt | | | |
| | ct | | | |

TABLE 12
CDR amino acid sequences of CD3B2029, CD3B2030, CD3B2051, and CD3B2089, using
different delineations.

| | | HCDR1 | HCDR2 | HCDR3 |
|---|---|---|---|---|
| | | (SEQ ID NO: ) | (SEQ ID NO:) | (SEQ ID NO: ) |
| CD3B2029 | Kabat | RSTMH | YINPSSAYTNYNQKFQG | PQVHYDYNGFPY |
| CD3B2089 | | (70) | (71) | (72) |
| CD3B2030 | Chothia | GYTFTRS | NPSSAY | PQVHYDYNGFP |
| CD3B2051 | | (73) | (74) | (75) |
| | IMGT | GYTFTRST | INPSSAYT | ASPQVHYDYNGFPY |
| | | (76) | (77) | (78) |
| | | LCDR1 | LCDR2 | LCDR3 |
| | | (SEQ ID NO:) | (SEQ ID NO:) | (SEQ ID NO:) |
| CD3B2029 | Kabat | SASSSVSYMN | DSSKLAS | QQWSRNPPT |
| CD3B2030 | | (79) | (80) | (81) |
| CD3B2051 | Chothia | SSSVSY | DSS | WSRNPP |
| CD3B2089 | | (82) | (83) | (84) |
| | IMGT | SSVSY | DSS | QQWSRNPPT |
| | | (85) | (83) | (81) |

TABLE 13
Percent retained binding to recombinant CD3 after heat
exposure, determined by ELISA.

| | % Retained | % Retained | % Retained |
|---|---|---|---|
| Clone | 55° C. | 60° C. | 65° C. |
| CD3B2030 NtoQ | 111 | 105 | 55 |
| CD3B2040 | 107 | 106 | 52 |
| CD3B2065 | 115 | 112 | 48 |
| CD3B2035 | 110 | 112 | 47 |
| CD3B2039 | 111 | 103 | 44 |
| CD3B2089 | 111 | 108 | 41 |
| CD3B2050 | 108 | 102 | 41 |
| CD3B2081 | 112 | 114 | 38 |
| CD3B2034 | 103 | 103 | 38 |
| CD3B2030 | 106 | 101 | 36 |
| CD3B2031 | 108 | 104 | 36 |
| CD3B2036 | 108 | 105 | 35 |
| CD3B2064 | 111 | 107 | 33 |
| CD3B2051 | 109 | 94 | 32 |
| CD3B2053 | 115 | 112 | 30 |
| CD3B2046 | 111 | 113 | 30 |
| CD3B2049 | 108 | 105 | 29 |
| CD3B2029 | 100 | 97 | 29 |
| CD3B2026 | 106 | 98 | 29 |
| CD3B2045 | 111 | 105 | 28 |
| CD3B2073 | 113 | 110 | 27 |
| CD3B2088 | 116 | 114 | 26 |
| CD3B2052 | 112 | 111 | 25 |
| CD3B2037 | 102 | 103 | 23 |
| CD3B2054 | 106 | 100 | 23 |
| CD3B2077 | 106 | 107 | 22 |
| CD3B2038 | 105 | 98 | 22 |
| CD3B2048 | 105 | 95 | 22 |
| CD3B2060 | 107 | 100 | 21 |
| CD3B2058 | 112 | 110 | 20 |
| CD3B2032 | 106 | 88 | 20 |
| CD3B2085 | 112 | 117 | 18 |
| CD3B2069 | 114 | 109 | 17 |
| CD3B2080 | 109 | 108 | 17 |
| CD3B2072 | 117 | 111 | 17 |
| CD3B2041 | 104 | 97 | 16 |
| CD3B2047 | 106 | 98 | 15 |
| CD3B2028 | 104 | 92 | 15 |
| CD3B2062 | 110 | 102 | 14 |
| CD3B2044 | 103 | 102 | 14 |
| CD3B2059 | 112 | 98 | 13 |
| CD3B2066 | 109 | 109 | 11 |
| CD3B2033 | 100 | 84 | 11 |
| CD3B2063 | 108 | 92 | 11 |
| CD3B2055 | 102 | 96 | 11 |
| CD3B2068 | 103 | 88 | 10 |
| CD3B2082 | 114 | 116 | 9 |
| CD3B2027 | 104 | 93 | 9 |
| CD3B2084 | 108 | 91 | 9 |
| CD3B2061 | 116 | 107 | 9 |
| CD3B2056 | 101 | 80 | 9 |
| CD3B2076 | 100 | 82 | 7 |
| CD3B2070 | 107 | 82 | 6 |
| CD3B2075 | 103 | 87 | 6 |
| CD3B2074 | 104 | 101 | 6 |
| CD3B2087 | 104 | 94 | 5 |
| CD3B2067 | 98 | 63 | 5 |
| CD3B2086 | 104 | 96 | 5 |
| CD3B2083 | 104 | 84 | 4 |
| CD3B2043 | 100 | 88 | 4 |
| CD3B2071 | 103 | 88 | 4 |
| Murine LH | 10 | 2 | 3 |
| CD3B2057 | 92 | 66 | 3 |
| CD3B2079 | 111 | 92 | 2 |
| CDR Graft (LH) | 21 | 3 | 2 |
| CD3B2078 | 107 | 88 | 2 |
| CD3B2042 | 96 | 83 | 2 |
| CD3B1130 | 90 | 11 | 1 |
| Murine HL | 19 | 0 | 1 |
| Cris7B | 1 | 1 | 1 |

TABLE 14
shows thermal stability cell binding data.

| | % Binding retained on T-cells | | | |
|---|---|---|---|---|
| Sample ID | RT | 55° C. | 60° C. | 65° C. |
| CD3B2030 | 1 | 1.048677 | 1.095739 | 0.756759 |
| CD3B2039 | 1 | 1.299133 | 1.003692 | 0.609466 |
| CD3B2031 | 1 | 1.122011 | 1.204702 | 0.543271 |
| CD3B2035 | 1 | 1.060978 | 1.141319 | 0.454924 |
| CD3B2041 | 1 | 1.064596 | 1.110962 | 0.44659 |
| CD3B2034 | 1 | 0.866167 | 0.783723 | 0.387208 |
| CD3B2085 | 1 | 1.008827 | 0.410542 | 0.384652 |
| CD3B2073 | 1 | 0.993273 | 1.099256 | 0.348245 |
| CD3B2029 | 1 | 1.058795 | 1.08433 | 0.328698 |
| CD3B2077 | 1 | 1.029112 | 1.098231 | 0.306981 |
| CD3B2045 | 1 | 1.046729 | 0.996753 | 0.29597 |
| CD3B2033 | 1 | 1.072045 | 0.9995 | 0.295245 |
| CD3B2038 | 1 | 1.027964 | 1.095242 | 0.2791 |
| CD3B2082 | 1 | 1.107911 | 0.681799 | 0.275996 |
| CD3B2088 | 1 | 1.014945 | 0.46063 | 0.257713 |
| CD3B2064 | 1 | 1.173944 | 0.741192 | 0.240813 |
| CD3B2044 | 1 | 0.78559 | 1.040365 | 0.198246 |
| CD3B2063 | 1 | 1.004685 | 0.996275 | 0.184745 |
| CD3B2058 | 1 | 1.052739 | 0.807821 | 0.174434 |
| CD3B2065 | 1 | 1.142664 | 1.33233 | 0.155581 |
| CD3B2071 | 1 | 1.014145 | 0.898827 | 0.119915 |
| CD3B2079 | 1 | 1.059072 | 0.978707 | 0.116397 |
| CD3B2089 | 1 | 1.084227 | 0.494349 | 0.111322 |
| CD3B2069 | 1 | 1.076064 | 1.479188 | 0.110357 |
| CD3B2087 | 1 | 1.01658 | 0.963514 | 0.105331 |
| CD3B2081 | 1 | 1.035179 | 1.204711 | 0.10163 |
| CD3B2072 | 1 | 0.872069 | 1.269992 | 0.093343 |
| CD3B2042 | 1 | 0.992719 | 0.934616 | 0.084226 |
| CD3B2043 | 1 | 0.990763 | 0.906431 | 0.080453 |
| CD3B2037 | 1 | 1.068237 | 0.986003 | 0.060975 |
| CD3B2078 | 1 | 1.005626 | 0.761767 | 0.057399 |
| CD3B2080 | 1 | 1.070525 | 1.133895 | 0.05733 |
| CD3B2086 | 1 | 1.007152 | 1.119914 | 0.040405 |
| Murine | 1 | 0.405601 | 0.079161 | 0.051493 |

### Mitigation of Post-Translational Modification Risks

[1017] It was determined that the parent molecule contained an “NG” motif in CDRH3 at positions #106-107, wherein the position number is counted from the N-terminus of the VH of CD3B2029, CD3B2030, CD3B2051, or CD3B2089 sequence (SEQ ID NOs: 55, 54, or 48). The “NG” motif could potentially present a risk of Post Translational Modification (PTM), specifically Asn deamidation, and lead to loss of activity. To mitigate this PTM risk, selected humanized variants CD3B2029, CD3B2030, CD3B2051, and CD3B2089, were further mutated at the N106 position, respectively, using molecular biology techniques well known in the art (Tables 15 and 16). Position N106 was mutated to one of the following residues A/G/S/F/E/T/R/V/I/Y/L/P/Q/K. These new variants were again exposed to various assays including titration, thermal stress, and cell binding, as described above. EC50 values for binding to Pan T-cells and Jurkat cells, as determined by ELISA are shown in Table 17, and the binding curves for CD3B2030 variants to recombinant CD3 (TRCW5, SEQ ID NO: 39), as an example, are shown in FIG. 4. The % retained binding following the indicated heat exposure is shown in Table 18. From these assays, 4 separate amino acid substitutions for the N position were selected for further testing. Most mutations at N106 maintained binding to some degree, and all were considered valuable since they provided a way to both tune the efficiency of T cell redirection and they could successfully eliminate risk of deamidation at N106.

[1018] Table 15 shows the variant CDR sequences made using CD3B2029, CD3B2030, CD3B2051, and CD3B2089 sequences.

[1019] Table 16 shows the list of substitutions in HCDR3 sequences that were made using CD3B2029, CD3B2030, CD3B2051, and CD3B2089 sequences, wherein the position number is counted from the N-terminus of the VH of CD3B2029, CD3B2030, CD3B2051, or CD3B2089 (SEQ ID NOs: 55, 54, or 48).

TABLE 15
CDR amino acid sequences of CD3B2029, CD3B2030, CD3B2051, and CD3B2089, using
Kabat delineation.

| | HCDR1 | HCDR2 | | | LCDR2 | LCDR3 |
|---|---|---|---|---|---|---|
| | (SEQ ID | (SEQ ID | HCDR3 | LCDR1 | (SEQ ID | (SEQ ID |
| | NO:) | NO:) | (SEQ ID NO:) | (SEQ ID NO:) | NO:) | NO:) |
| CD3B2029 | RSTMH | YINPSSAYT | PQVHYDYXG | SASSSVSYMN | DSSKLAS | QQWSRNPPT |
| CD3B2030 | (70) | NYNQKFQG | FPY, | (79) | (80) | (81) |
| CD3B2051 | | (71) | wherein X | | | |
| CD3B2089 | | | can be Q, A, | | | |
| | | | G, or S | | | |
| | | | (86) | | | |

TABLE 16
Substitutions in HCDR3 sequences that were made in CD3B2029,
CD3B2030, CD3B2051, and CD3B2089 sequences, wherein the
position number was counted from the N-terminus of the VH of
CD3B2029, CD3B2030, CD3B2051, or CD3B2089
(SEQ ID NOs: 55, 54, or 48).

| CD3 variant | CDR | Substitution |
|---|---|---|
| CD3B2029 | Heavy Chain CDR3 | N106Q |
| CD3B2029 | Heavy Chain CDR3 | N106A |
| CD3B2029 | Heavy Chain CDR3 | N106G |
| CD3B2029 | Heavy Chain CDR3 | N106S |
| CD3B2030 | Heavy Chain CDR3 | N106Q |
| CD3B2030 | Heavy Chain CDR3 | N106A |
| CD3B2030 | Heavy Chain CDR3 | N106G |
| CD3B2030 | Heavy Chain CDR3 | N106S |
| CD3B2051 | Heavy Chain CDR3 | N106Q |
| CD3B2051 | Heavy Chain CDR3 | N106A |
| CD3B2051 | Heavy Chain CDR3 | N106G |
| CD3B2051 | Heavy Chain CDR3 | N106S |
| CD3B2089 | Heavy Chain CDR3 | N106Q |
| CD3B2089 | Heavy Chain CDR3 | N106A |
| CD3B2089 | Heavy Chain CDR3 | N106G |
| CD3B2089 | Heavy Chain CDR3 | N106S |

TABLE 17
EC50 values for N106 PTM-mitigated,
humanized Cris-7 variants.

| ID | EC₅₀ (nM) |
|---|---|
| CD3B2030 | 8.844 |
| CD3B2030N106F | 9.699 |
| CD3B2030N106Q | 10.04 |
| CD3B2030N106H | 10.57 |
| CD3B2030N106R | 10.57 |
| CD3B2030N106L | 11.36 |
| CD3B2030N106K | 11.66 |
| CD3B2030N106A | 12.77 |
| CD3B2030N106G | 14.28 |
| CD3B2030N106S | 19.08 |
| CD3B2030N106I | ~13.27 |
| CD3B2030N106P | ~23.96 |
| CD3B2051N106E | 8.046 |
| CD3B2051 | 8.727 |
| CD3B2051N106H | 10.86 |
| CD3B2051N106P | 10.89 |
| CD3B2051N106S | 11.12 |
| CD3B2051N106R | 11.2 |
| CD3B2051N106K | 11.4 |
| CD3B2051N106A | 12.07 |
| CD3B2051N106G | 13.76 |
| CD3B2051N106V | 15.15 |
| CD3B2089 | 8.794 |
| CD3B2089N106S | 10.02 |
| CD3B2089N106F | 10.13 |
| CD3B2089N106E | 10.3 |
| CD3B2089N106T | 11.08 |
| CD3B2089N106R | 11.25 |
| CD3B2089G107F | 14.4 |
| CD3B2089G107V | 17.39 |
| CD3B2089N106I | 17.85 |
| CD3B2089G107Y | 21.4 |
| CD3B2089N106L | 30.8 |
| CD3B2089N106P | ~27.4 |
| CD3B2089N106G | ~429 |

TABLE 18
Thermal stability analysis of PTM-mitigated, humanized
Cris-7 variants.

| | % Retained | % Retained | % Retained |
|---|---|---|---|
| | 55° C. | 60° C. | 65° C. |
| CD3B2030 N1060 | 109.6% | 97.5% | 72.3% |
| CD3B2030 N106H | 103.5% | 98.9% | 55.7% |
| CD3B2030 N106A | 111.0% | 102.7% | 55.6% |
| CD3B2030 N106R | 107.1% | 104.2% | 53.8% |
| CD3B2030 | 104.4% | 102.4% | 41.3% |
| CD3B2030 N106L | 107.2% | 100.5% | 25.6% |
| CD3B2030 N106F | 106.1% | 83.3% | 21.8% |
| CD3B2030 N106K | 99.7% | 87.2% | 7.3% |
| CD3B2030 N106G | 114.7% | 59.8% | 1.7% |
| CD3B2030 N106S | 64.6% | 19.0% | 0.6% |
| CD3B2051 N106A | 98.9% | 97.0% | 33.3% |
| CD3B2051 | 103.9% | 95.0% | 10.9% |
| CD3B2051 N106H | 103.1% | 84.2% | 9.0% |
| CD3B2051 N106R | 101.2% | 74.5% | 8.4% |
| CD3B2051 N106K | 116.5% | 91.3% | 4.0% |
| CD3B2051 N106S | 100.9% | 70.9% | 1.5% |
| CD3B2051 N106G | 98.9% | 33.1% | 1.5% |
| CD3B2051 N106V | 54.9% | 1.4% | 0.7% |
| CD3B2051 N106E | 78.4% | 15.4% | 0.5% |
| CD3B2051 N106P | 87.7% | 32.6% | 0.2% |
| CD3B2089 N106R | 101.6% | 103.0% | 60.4% |
| CD3B2089 N106F | 112.7% | 101.3% | 36.2% |
| CD3B2089 N106E | 113.3% | 108.3% | 33.2% |
| CD3B2089 | 104.5% | 109.2% | 15.1% |
| CD3B2089 N106S | 102.3% | 90.2% | 5.4% |
| CD3B2089 N106T | 108.4% | 76.7% | 1.4% |
| CD3B2089 N106I | 40.6% | 2.5% | 0.9% |

[1020] Based on the ELISA data, we chose two substitutions which had similar affinities to the parent molecule. For the NG Motif, we chose substituting a Q or A for the N106 position. Additionally, it was desired to obtain potential substitutions which may lower the affinity. For the NG Motif, we chose G and S for the N position (which modestly lowered the affinity, based on ELISA data). These variants were then formatted as bsAbs for further analysis for their abilities to mediate cytotoxicity and for their biophysical characteristics. Note that Cris-7-based scFv moieties were formatted in both LH and in HL orientation in the bsAbs. LH orientation provided additional ability to modulate the affinity for CD3 and thus to tune the efficiency of T cell redirection.

[1021] Table 19 shows sequences for select CD3-specific variants.

TABLE 19
Sequences for select CD3 specific variants, using Kabat delineation..

| ID | Heavy Chain | Light Chain |
|---|---|---|
| CD3B2030 | CDR1: RSTMH (SEQ ID NO: 70) | CDR1: SASSSVSYMN (SEQ ID NO: 79) |
| | CDR2: YINPSSAYTNYNQKFQG (SEQ ID NO: 71) | CDR2: DSSKLAS (SEQ ID NO: 80) |
| | CDR3: PQVHYDYNGFPY (SEQ ID NO: 72) | CDR3: QQWSRNPPT (SEQ ID NO: 81) |
| | VH: | VL: |
| | QVQLVQSGAEVKKPGSSVKVSCKASGY | EIVLTQSPATLSASPGERVTLSCSAS |
| | TFTRSTMHWVKQAPGQGLEWIGYINPS | SSVSYMNWYQQKPGQAPRRWIYD |
| | SAYTNYNQKFQGRVTLTADKSTSTAY | SSKLASGVPARFSGSGSGRDYTLTI |
| | MELSSLRSEDTAVYYCASPQVHYDYNG | SSLEPEDFAVYYCQQWSRNPPTFG |
| | FPYWGQGTLVTVSS (SEQ ID NO: 55) | GGTKVEIK (SEQ ID NO: 58) |
| | VH DNA sequence (SEQ ID NO: 64) | VL DNA sequence (SEQ ID NO: 68) |
| CD3B2030- | CDR1: RSTMH (SEQ ID NO: 70) | CDR1: SASSSVSYMN (SEQ ID NO: 79) |
| N106A | CDR2: YINPSSAYTNYNQKFQG (SEQ ID NO: 71) | CDR2: DSSKLAS (SEQ ID NO: 80) |
| | CDR3: PQVHYDYAGFPY (SEQ ID NO: 87) | CDR3: QQWSRNPPT (SEQ ID NO: 81) |
| | VH: | VL: |
| | QVQLVQSGAEVKKPGSSVKVSCKASGY | EIVLTQSPATLSASPGERVTLSCSAS |
| | TFTRSTMHWVKQAPGQGLEWIGYINPS | SSVSYMNWYQQKPGQAPRRWIYD |
| | SAYTNYNQKFQGRVTLTADKSTSTAY | SSKLASGVPARFSGSGSGRDYTLTI |
| | MELSSLRSEDTAVYYCASPQVHYDYAG | SSLEPEDFAVYYCQQWSRNPPTFG |
| | FPYWGQGTLVTVSS (SEQ ID NO: 88) | GGTKVEIK (SEQ ID NO: 58) |
| | VH DNA sequence | VL DNA sequence |
| | CAGGTTCAACTGGTTCAGTCTGGCGC | GAGATCGTGCTGACCCAGTCTCC |
| | CGAAGTGAAGAAACCTGGCTCCTCCG | TGCCACACTGTCAGCCTCTCCAG |
| | TCAAGGTGTCCTGCAAGGCTFCCGGC | GCGAGAGAGTCACCCTGTCCTGC |
| | TACACCTTTACCAGATCCACCATGCAC | TCCGCTTCCTCCTCCGTGTCCTAC |
| | TGGGTCAAGCAGGCCCCTGGACAAGG | ATGAACTGGTATCAGCAGAAGCC |
| | CTTGGAGTGGATCGGCTACATCAACC | CGGCCAGGCTCCTAGACGGTGGA |
| | CCAGCTCCGCCTACACCAACTACAAC | TCTACGACTCCTCCAAGCTGGCCT |
| | CAGAAATTCCAGGGCAGAGTGACCCT | CTGGCGTCCCTGCCCGCTTTTCCG |
| | GACCGCCGACAAGTCTACCTCCACCG | GCTCTGGCTCTGGCAGAGACTAT |
| | CCTACATGGAACTGTCCAGCCTGAGA | ACCCTGACCATCTCCAGCCTGGA |
| | TCTGAGGACACCGCCGTGTACTACTG | ACCTGAGGACTTCGCCGTGTACT |
| | CGCCTCTCCTCAGGTCCACTACGACTA | ACTGCCAGCAGTGGTCTAGAAAC |
| | CGCCGGCTTTCCTTATTGGGGCCAGG | CCTCCTACCTTTGGCGGAGGCAC |
| | GCACACTGGTCACCGTTTCTTCT (SEQ | CAAGGTGGAAATCAAG (SEQ ID |
| | ID NO: 89) | NO: 68) |
| CD3B2089 | CDR1: RSTMH (SEQ ID NO: 70) | CDR1: SASSSVSYMN (SEQ ID NO: 79) |
| | CDR2: YINPSSAYTNYNQKFQG (SEQ ID NO: 71) | CDR2: DSSKLAS (SEQ ID NO: 80) |
| | CDR3: PQVHYDYNGFPY (SEQ ID NO: 72) | CDR3: QQWSRNPPT (SEQ ID NO: 81) |
| | VH: | VL: |
| | QVQLVQSGAEVKKPGSSVKVSCKASGY | EIVLTQSPATLSASPGERVTLSCSAS |
| | TFTRSTMHWVRQAPGQGLEWMGYINP | SSVSYMNWYQQKPGQAPRRWIYD |
| | SSAYTNYAQKFQGRVTLTADKSTSTAY | SSKLASGVPARFSGSGSGRDYTLTI |
| | MELSSLRSEDTAVYYCASPQVHYDYNG | SSLEPEDFAVYYCQQWSRNPPTFG |
| | FPYWGQGTLVTVSS (SEQ ID NO: 48) | GGTKVEIK (SEQ ID NO: 58) |
| | VH DNA sequence (SEQ ID NO: 66) | VL DNA sequence (SEQ ID NO: 68) |
| CD3B2089- | CDR1: RSTMH (SEQ ID NO: 70) | CDR1: SASSSVSYMN (SEQ ID NO: 79) |
| N106G | CDR2: YINPSSAYTNYNQKFQG (SEQ ID NO: 71) | CDR2: DSSKLAS (SEQ ID NO: 80) |
| | CDR3: PQVHYDYGGFPY (SEQ ID NO: 90) | CDR3: QQWSRNPPT (SEQ ID NO: 81) |
| | VH: | VL: |
| | QVQLVQSGAEVKKPGSSVKVSCKASGY | EIVLTQSPATLSASPGERVTLSCSAS |
| | TFTRSTMHWVRQAPGQGLEWMGYINP | SSVSYMNWYQQKPGQAPRRWIYD |
| | SSAYTNYAQKFQGRVTLTADKSTSTAY | SSKLASGVPARFSGSGSGRDYTLTI |
| | MELSSLRSEDTAVYYCASPQVHYDYGG | SSLEPEDFAVYYCQQWSRNPPTFG |
| | FPYWGQGTLVTVSS (SEQ ID NO: 242) | GGTKVEIK (SEQ ID NO: 58) |
| | VH DNA sequence | VL DNA sequence (SEQ ID NO: 68) |
| | CAGGTTCAACTGGTTCAGTCTGGCGC | |
| | CGAAGTGAAGAAACCTGGCTCCTCCG | |
| | TGAAAGTGTCCTGCAAGGCTTCCGGC | |
| | TACACTTTTACCAGATCCACCATGCAC | |
| | TGGGTCCGACAGGCTCCAGGACAAGG | |
| | CTTGGAGTGGATGGGCTACATCAACC | |
| | CCAGCTCCGCCTACACCAACTACGCC | |
| | CAGAAATTCCAGGGCAGAGTGACCCT | |
| | GACCGCCGACAAGTCTACCTCCACCG | |
| | CCTACATGGAACTGTCCAGCCTGAGA | |
| | TCTGAGGACACCGCCGTGTACTACTG | |
| | CGCTTCTCCTCAGGTGCACTACGACTA | |
| | CGGCGGCTTTCCTTATTGGGGCCAGG | |
| | GCACACTGGTCACCGTTTCTTCT (SEQ | |
| | ID NO: 91) | |

### Epitope Identification

[1022] The epitope on CD3 was determined by hydrogen-deuterium exchange mass spectrometry (HDX-MS). The antibody clone OKT3 was used as a control for the HDX experiment, since its epitope on CD3ε was known from crystal structure (PDB ID 1SY6) (Kjer-Nielsen, L. et al.; Proc Natl Acad Sci USA 101, 7675-7680).

[1023] On-Exchange Experiment for HDX-MS. On-exchange reaction was initiated by mixing 10 μL of 10 μM CD3W220 (SEQ ID NO: 5), which was comprised of CD3εγ fused with a 26-aa linker region fused onto a serum albumin domain, with or without 1.2 molar-excess of ligand and 30 μL of H₂O or a deuterated buffer (20 mM MES, pH 6.4, 150 mM NaCl in 95% D20 or 20 mM Tris, pH 8.4, 150 mM NaCl in 95% D20). The reaction mixture was incubated for 15, 50, 150, 500, or 1,500 s at 1.2° C. The on-exchanged solution was quenched by the addition of chilled 40 μL of 8 M urea, 1 M TCEP, pH 3.0 and immediately analyzed.

CD3W220 (CD3ϵγ-HSA-6xHis) (SEQ ID NO: 92):
QDGNEEMGGITQTPYKVSISGTTVILTCPQYPGSEILWQHNDKNIGGDED
DKNIGSDEDHLSLKEFSELEQSGYYVCYPRGSKPEDANFYLYLRARVGSA
DDAKKDAAKKDDAKKDDAKKDGSQSIKGNHLVKVYDYQEDGSVLLTCDAE
AKNITWFKDGKMIGFLTEDKKKWNLGSNAKDPRGMYQCKGSQNKSKPLQV
YYRMGGGSDAHKSEVAHRFKDLGEENFKALVLIAFAQYLQQSPFEDHVKL
VNEVTEFAKTCVADESAENCDKSLHTLFGDKLCTVATLRETYGEMADCCA
KQEPERNECFLQHKDDNPNLPRLVRPEVDVMCTAFHDNEETFLKKYLYEI
ARRHPYFYAPELLFFAKRYKAAFTECCQAADKAACLLPKLDELRDEGKAS
SAKQRLKCASLQKFGERAFKAWAVARLSQRFPKAEFAEVSKLVTDLTKVH
TECCHGDLLECADDRADLAKYICENQDSISSKLKECCEKPLLEKSHCIAE
VENDEMPADLPSLAADFVESKDVCKNYAEAKDVFLGMFLYEYARRHPDYS
VVLLLRLAKTYETTLEKCCAAADPHECYAKVFDEFKPLVEEPQNLIKQNC
ELFEQLGEYKFQNALLVRYTKKVPQVSTPTLVEVSRNLGKVGSKCCKHPE
AKRMPCAEDYLSVVLNQLCVLHEKTPVSDRVTKCCTESLVNRRPCFSALE
VDETYVPKEFNAETFTFHADICTLSEKERQIKKQTALVELVKHKPKATKE
QLKAVMDDFAAFVEKCCKADDKETCFAEEGKKLVAASQAALGLGGGSHHH
HHHHH

[1024] Procedure for HDX-MS Data Acquisition. HDX-MS sample preparation was performed with automated HDx system (LEAP Technologies, Morrisville, N.C.). The columns and pump were; protease, protease type XIII (protease from Aspergillus saitoi, type XIII)/pepsin column (w/w, 1:1; 2.1×30 mm) (NovaBioAssays Inc., Woburn, Mass.); trap, ACQUITY UPLC BEH C18 VanGuard Pre-column (2.1×5 mm) (Waters, Milford, Mass.), analytical, Accucore C18 (2.1×100 mm) (Thermo Fisher Scientific, Waltham, Mass.); and LC pump, VH-P10-A (Thermo Fisher Scientific). The loading pump (from the protease column to the trap column) was set at 600 μL/min with 99% water, 1% acetonitrile, 0.1% formic acid. The gradient pump (from the trap column to the analytical column) was set from 8% to 28% acetonitrile in 0.1% aqueous formic acid in 20 min at 100 μL/min.

[1025] MS Data Acquisition. Mass spectrometric analyses were carried out using an LTQ™ Orbitrap Fusion Lumos mass spectrometer (Thermo Fisher Scientific) with the capillary temperature at 275° C., resolution 150,000, and mass range (m/z) 300-1,800.

[1026] HDX-MS Data Extraction. BioPharma Finder 3.0 (Thermo Fisher Scientific) was used for the peptide identification of non-deuterated samples prior to the HDX experiments. HDExaminer version 2.5 (Sierra Analytics, Modesto, Calif.) was used to extract centroid values from the MS raw data files for the HDX experiments.

[1027] HDX-MS Data Analysis. The extracted HDX-MS data were further analyzed in Excel. All exchange time points (at pH 6.4 or pH 8.4 at 1.2° C.) were converted to the equivalent time points at pH 7.4 and 23° C. (e.g., 15 s at pH 6.4 at 1.2° C. is equivalent of 0.15 s at pH 7.4 at 23° C.; Table 20).

TABLE 20
HDX reaction conditions and exchange times versus
exchange times corrected to pH 7.4 and 23° C.

| Time adjusted to | pH 6.4 | pH 8.4 |
|---|---|---|
| pH 7.4, 23° C. (s) | 1.2° C. (s) | 1.2° C. (s) |
| 0.015 | — | — |
| 0.05 | — | — |
| 0.15 | 15 | — |
| 0.5 | 50 | — |
| 1.5 | 150 | — |
| 5 | 500 | — |
| 15 | 1,500 | 15 |
| 50 | — | 50 |
| 150 | — | 150 |
| 500 | — | 500 |
| 1,500 | — | 1,500 |

[1028] Results. The antibody clone OKT3 was used as a control for the HDX experiment, since its epitope on CD3ε was known from crystal structure (PDB ID 1SY6). Consistent with the crystal structure of OKT3 bound to CD3ε, the epitope of OKT3 was found to consist of peptides spanning residues 29-37, 79-84 and 87-89. To determine the epitope on CD3ε bound by Cris7b, a bi-specific protein comprising Cris7b-N106Q formatted as Fab (SEQ ID Nos: 93 and 94) and paired with an antigen-specific scFv-Fc arm was used. This experiment showed that Cris7 interacted with an epitope consisting of peptides spanning residues 33-37, 53-54, and 79-84, which partially overlapped with that of OKT3 but also interacted with a peptide spanning residues 53-54, which were unique compared to OKT3.

Cris7b-N106Q HC, SEQ ID NO 93:
QVQLLQSAAEVKKPGESLKISCKGSGYTFTRSTMHWVRQTPGKGLEWMGY
INPSSAYTNYNQKFKDQVTISADKSISTAYLQWSSLKASDTAMYYCARPQ
VHYDYQGFPYWGQGTLVTVSSASTKGPSVFPLAPSSKSTSGGTAALGCLV
KDYFPEPVTVSWNSGALTSGVHTFPAVLQSSGLYSLSSVVTVPSSSLGTQ
TYICNVNHKPSNTKVDKKVEPKSCDKTHTCPPCPAPEAAGGPSVFLFPPK
PKDTLMISRTPEVTCVVVSVSHEDPEVKFNWYVDGVEVHNAKTKPREEQY
NSTYRVVSVLTVLHQDWLNGKEYKCKVSNKALPAPIEKTISKAKGQPREP
QVYVYPPSREEMTKNQVSLTCLVKGFYPSDIAVEWESNGQPENNYKTTPP
VLDSDGSFALVSKLTVDKSRWQQGNVFSCSVMHEALHNHYTQKSLSLSPG
Cris7b-N106Q LC, SEQ ID NO: 94
EIVLTQSPSAMSASVGDRVTITCSASSSVSYMNWYQQKPGKVPKRLIYDS
SKLASGVPSRFSGSGSGTEYTLTISSLQPEDFATYYCQQWSRNPPTFGQG
TMLEIKRTVAAPSVFIFPPSDEQLKSGTASVVCLLNNFYPREAKVQWKVD
NALQSGNSQESVTEQDSKDSTYSLSSTLTLSKADYEKHKVYACEVTHQGL
SSPVTKSFNRGEC

### Example 2. Characterization of Novel CD3 Binders in a Bi-Specific Format

[1029] The VH/VL regions of the anti-CD3 antibodies generated in Example 1 and the VH/VL regions of the anti-BCMA antibodies described below were engineered into bispecific format and expressed as IgG1 (Table 21).

Engineering of CD3 scFvs for BCMAxCD3 Bispecific Generation.

[1030] CD3 VH/VL regions were engineered as scFvs in either VH-Linker-VL (also termed “HL”) or VL-linker-VH (also termed “LH”) orientations using the linker of SEQ ID NO: 3 (Table 22). The VH-Linker-VL or VL-linker-VH scFv molecules binding CD3 were further engineered into a scFv-hinge-CH2-CH3 (also termed scFv-Fc) format comprising Fc silencing mutation (L234A/L235A/D265S) and the T350V/L351Y/F405A/Y407V mutations designed to promote selective heterodimerization (Table 23). The polypeptide of SEQ ID NO: 95 was used as the constant domain hinge-CH2-CH3. DNA sequences of anti-CD3 molecules in scFv format and scFv-hinge-CH2-CH3 format are shown in Table 24.

(huIgG1_Glm(17)-hinge-Fc_C220S_AAS_ZWA)
SEQ ID NO: 95
EPKSSDKTHTCPPCPAPEAAGGPSVFLFPPKPKDTLMISRTPEVTCVVVS
VSHEDPEVKFNWYVDGVEVHNAKTKPREEQYNSTYRVVSVLTVLHQDWLN
GKEYKCKVSNKALPAPIEKTISKAKGQPREPQVYVYPPSREEMTKNQVSL
TCLVKGFYPSDIAVEWESNGQPENNYKTTPPVLDSDGSFALVSKLTVDKS
RWQQGNVFSCSVMHEALHNHYTQKSLSLSPG

TABLE 21
CD3xBCMA bi-specific proteins.

| ID | Description |
|---|---|
| BC3B129 | HC1: CD3B2089-N106S LH scFv; HC2: BCMB519 Fab |
| BC3B128 | HC1: CD3B2089-N106Q LH scFv; HC2: BCMB519 Fab |
| BC3B127 | HC1: CD3B2089-N106G LH scFv; HC2: BCMB519 Fab |
| BC3B126 | HC1: CD3B2089-N106A LH scFv; HC2: BCMB519 Fab |
| BC3B125 | HC1: CD3B2089 LH scFv; HC2: BCMB519 Fab |
| BC3B124 | HC1: CD3B2051-N106S LH scFv; HC2: BCMB519 Fab |
| BC3B123 | HC1: CD3B2051-N106Q LH scFv; HC2: BCMB519 Fab |
| BC3B122 | HC1: CD3B2051-N106G LH scFv; HC2: BCMB519 Fab |
| BC3B121 | HC1: CD3B2051-N106A LH scFv; HC2: BCMB519 Fab |
| BC3B120 | HC1: CD3B2051 LH scFv; HC2: BCMB519 Fab |
| BC3B119 | HC1: CD3B2030-N106S LH scFv; HC2: BCMB519 Fab |
| BC3B118 | HC1: CD3B2030-N106G LH scFv; HC2: BCMB519 Fab |
| BC3B117 | HC1: CD3B2030-N106A LH scFv; HC2: BCMB519 Fab |
| BC3B116 | HC1: CD3B2030 LH scFv; HC2: BCMB519 Fab |
| BC3B115 | HC1: CD3B2089-N106S HL scFv; HC2: BCMB519 Fab |
| BC3B114 | HC1: CD3B2089-N106Q HL scFv; HC2: BCMB519 Fab |
| BC3B113 | HC1: CD3B2089-N106G HL scFv; HC2: BCMB519 Fab |
| BC3B112 | HC1: CD3B2089-N106A HL scFv; HC2: BCMB519 Fab |
| BC3B111 | HC1: CD3B2089 HL scFv; HC2: BCMB519 Fab |
| BC3B110 | HC1: CD3B2051-N106S HL scFv; HC2: BCMB519 Fab |
| BC3B109 | HC1: CD3B2051-N106Q HL scFv; HC2: BCMB519 Fab |
| BC3B108 | HC1: CD3B2051-N106G HL scFv; HC2: BCMB519 Fab |
| BC3B107 | HC1: CD3B2051-N106A HL scFv; HC2: BCMB519 Fab |
| BC3B106 | HC1: CD3B2051 HL scFv; HC2: BCMB519 Fab |
| BC3B105 | HC1: CD3B2030-N106S HL scFv; HC2: BCMB519 Fab |
| BC3B104 | HC1: CD3B2030-N106G HL scFv; HC2: BCMB519 Fab |
| BC3B103 | HC1: CD3B2030-N106A HL scFv; HC2: BCMB519 Fab |
| BC3B102 | HC1: CD3B2030 HL scFv; HC2: BCMB519 Fab |
| BC3B53 | HC1: CD3B2030-N106Q LH scFv; HC2: BCMB519 Fab |
| BC3B51 | HC1: CD3B2030-N106Q HL scFv; HC2: BCMB519 Fab |

HL-VH-Linker-VL fused to Fc;
LH-VL-Linker-VH fused to Fe

TABLE 22
CD3 specific scFvs sequences.

| | | SEQ |
|---|---|---|
| | | ID |
| ID | Amino acid sequence | NO: |
| CD3B2089-N106S | EIVLTQSPATLSASPGERVTLSCSASSSVSYMNWYQQKPG | 96 |
| LH scFv | QAPRRWIYDSSKLASGVPARFSGSGSGRDYTLTISSLEPE | |
| | DFAVYYCQQWSRNPPTFGGGTKVEIKGGSEGKSSGSGSE | |
| | SKSTGGSQVQLVQSGAEVKKPGSSVKVSCKASGYTFTRS | |
| | TMHWVRQAPGQGLEWMGYINPSSAYTNYAQKFQGRVT | |
| | LTADKSTSTAYMELSSLRSEDTAVYYCASPQVHYDYSGF | |
| | PYWGQGTLVTVSS | |
| CD3B2089-N106Q | EIVLTQSPATLSASPGERVTLSCSASSSVSYMNWYQQKPG | 97 |
| LH scFv | QAPRRWIYDSSKLASGVPARFSGSGSGRDYTLTISSLEPE | |
| | DFAVYYCQQWSRNPPTFGGGTKVEIKGGSEGKSSGSGSE | |
| | SKSTGGSQVQLVQSGAEVKKPGSSVKVSCKASGYTFTRS | |
| | TMHWVRQAPGQGLEWMGYINPSSAYTNYAQKFQGRVT | |
| | LTADKSTSTAYMELSSLRSEDTAVYYCASPQVHYDYQGF | |
| | PYWGQGTLVTVSS | |
| CD3B2089-N106G | EIVLTQSPATLSASPGERVTLSCSASSSVSYMNWYQQKPG | 98 |
| LH scFv | QAPRRWIYDSSKLASGVPARFSGSGSGRDYTLTISSLEPE | |
| | DFAVYYCQQWSRNPPTFGGGTKVEIKGGSEGKSSGSGSE | |
| | SKSTGGSQVQLVQSGAEVKKPGSSVKVSCKASGYTFTRS | |
| | TMHWVRQAPGQGLEWMGYINPSSAYTNYAQKFQGRVT | |
| | LTADKSTSTAYMELSSLRSEDTAVYYCASPQVHYDYGGF | |
| | PYWGQGTLVTVSS | |
| CD3B2089-N106A | EIVLTQSPATLSASPGERVTLSCSASSSVSYMNWYQQKPG | 99 |
| LH scFv | QAPRRWIYDSSKLASGVPARFSGSGSGRDYTLTISSLEPE | |
| | DFAVYYCQQWSRNPPTFGGGTKVEIKGGSEGKSSGSGSE | |
| | SKSTGGSQVQLVQSGAEVKKPGSSVKVSCKASGYTFTRS | |
| | TMHWVRQAPGQGLEWMGYINPSSAYTNYAQKFQGRVT | |
| | LTADKSTSTAYMELSSLRSEDTAVYYCASPQVHYDYAGF | |
| | PYWGQGTLVTVSS | |
| CD3B2089 | EIVLTQSPATLSASPGERVTLSCSASSSVSYMNWYQQKPG | 100 |
| LH scFv | QAPRRWIYDSSKLASGVPARFSGSGSGRDYTLTISSLEPE | |
| | DFAVYYCQQWSRNPPTFGGGTKVEIKGGSEGKSSGSGSE | |
| | SKSTGGSQVQLVQSGAEVKKPGSSVKVSCKASGYTFTRS | |
| | TMHWVRQAPGQGLEWMGYINPSSAYTNYAQKFQGRVT | |
| | LTADKSTSTAYMELSSLRSEDTAVYYCASPQVHYDYNGF | |
| | PYWGQGTLVTVSS | |
| CD3B2051-N106S | EIVLTQSPATLSASPGERVTLSCSASSSVSYMNWYQQKPG | 101 |
| LH scFv | QAPRRLIYDSSKLASGVPARFSGSGSGRDYTLTISSLEPED | |
| | FAVYYCQQWSRNPPTFGGGTKVEIKGGSEGKSSGSGSES | |
| | KSTGGSQVQLVQSGAEVKKPGSSVKVSCKASGYTFTRST | |
| | MHWVKQAPGQGLEWMGYINPSSAYTNYNQKFQGRVTL | |
| | TADKSTSTAYMELSSLRSEDTAVYYCASPQVHYDYSGFP | |
| | YWGQGTLVTVSS | |
| CD3B2051-N106Q | EIVLTQSPATLSASPGERVTLSCSASSSVSYMNWYQQKPG | 102 |
| LH scFv | QAPRRLIYDSSKLASGVPARFSGSGSGRDYTLTISSLEPED | |
| | FAVYYCQQWSRNPPTFGGGTKVEIKGGSEGKSSGSGSES | |
| | KSTGGSQVQLVQSGAEVKKPGSSVKVSCKASGYTFTRST | |
| | MHWVKQAPGQGLEWMGYINPSSAYTNYNQKFQGRVTL | |
| | TADKSTSTAYMELSSLRSEDTAVYYCASPQVHYDYQGFP | |
| | YWGQGTLVTVSS | |
| CD3B2051-N106G | EIVLTQSPATLSASPGERVTLSCSASSSVSYMNWYQQKPG | 103 |
| LH scFv | QAPRRLIYDSSKLASGVPARFSGSGSGRDYTLTISSLEPED | |
| | FAVYYCQQWSRNPPTFGGGTKVEIKGGSEGKSSGSGSES | |
| | KSTGGSQVQLVQSGAEVKKPGSSVKVSCKASGYTFTRST | |
| | MHWVKQAPGQGLEWMGYINPSSAYTNYNQKFQGRVTL | |
| | TADKSTSTAYMELSSLRSEDTAVYYCASPQVHYDYGGFP | |
| | YWGQGTLVTVSS | |
| CD3B2051-N106A | EIVLTQSPATLSASPGERVTLSCSASSSVSYMNWYQQKPG | 104 |
| LH scFv | QAPRRLIYDSSKLASGVPARFSGSGSGRDYTLTISSLEPED | |
| | FAVYYCQQWSRNPPTFGGGTKVEIKGGSEGKSSGSGSES | |
| | KSTGGSQVQLVQSGAEVKKPGSSVKVSCKASGYTFTRST | |
| | MHWVKQAPGQGLEWMGYINPSSAYTNYNQKFQGRVTL | |
| | TADKSTSTAYMELSSLRSEDTAVYYCASPQVHYDYAGFP | |
| | YWGQGTLVTVSS | |
| CD3B2051 | EIVLTQSPATLSASPGERVTLSCSASSSVSYMNWYQQKPG | 105 |
| LH scFv | QAPRRLIYDSSKLASGVPARFSGSGSGRDYTLTISSLEPED | |
| | FAVYYCQQWSRNPPTFGGGTKVEIKGGSEGKSSGSGSES | |
| | KSTGGSQVQLVQSGAEVKKPGSSVKVSCKASGYTFTRST | |
| | MHWVKQAPGQGLEWMGYINPSSAYTNYNQKFQGRVTL | |
| | TADKSTSTAYMELSSLRSEDTAVYYCASPQVHYDYNGFP | |
| | YWGQGTLVTVSS | |
| CD3B2030-N106S | EIVLTQSPATLSASPGERVTLSCSASSSVSYMNWYQQKPG | 106 |
| LH scFv | QAPRRWIYDSSKLASGVPARFSGSGSGRDYTLTISSLEPE | |
| | DFAVYYCQQWSRNPPTFGGGTKVEIKGGSEGKSSGSGSE | |
| | SKSTGGSQVQLVQSGAEVKKPGSSVKVSCKASGYTFTRS | |
| | TMHWVKQAPGQGLEWIGYINPSSAYTNYNQKFQGRVTL | |
| | TADKSTSTAYMELSSLRSEDTAVYYCASPQVHYDYSGFP | |
| | YWGQGTLVTVSS | |
| CD3B2030-N106G | EIVLTQSPATLSASPGERVTLSCSASSSVSYMNWYQQKPG | 107 |
| LH scFv | QAPRRWIYDSSKLASGVPARFSGSGSGRDYTLTISSLEPE | |
| | DFAVYYCQQWSRNPPTFGGGTKVEIKGGSEGKSSGSGSE | |
| | SKSTGGSQVQLVQSGAEVKKPGSSVKVSCKASGYTFTRS | |
| | TMHWVKQAPGQGLEWIGYINPSSAYTNYNQKFQGRVTL | |
| | TADKSTSTAYMELSSLRSEDTAVYYCASPQVHYDYGGFP | |
| | YWGQGTLVTVSS | |
| CD3B2030-N106A | EIVLTQSPATLSASPGERVTLSCSASSSVSYMNWYQQKPG | 108 |
| LH scFv | QAPRRWIYDSSKLASGVPARFSGSGSGRDYTLTISSLEPE | |
| | DFAVYYCQQWSRNPPTFGGGTKVEIKGGSEGKSSGSGSE | |
| | SKSTGGSQVQLVQSGAEVKKPGSSVKVSCKASGYTFTRS | |
| | TMHWVKQAPGQGLEWIGYINPSSAYTNYNQKFQGRVTL | |
| | TADKSTSTAYMELSSLRSEDTAVYYCASPQVHYDYAGFP | |
| | YWGQGTLVTVSS | |
| CD3B2030 | EIVLTQSPATLSASPGERVTLSCSASSSVSYMNWYQQKPG | 109 |
| LH scFv | QAPRRWIYDSSKLASGVPARFSGSGSGRDYTLTISSLEPE | |
| | DFAVYYCQQWSRNPPTFGGGTKVEIKGGSEGKSSGSGSE | |
| | SKSTGGSQVQLVQSGAEVKKPGSSVKVSCKASGYTFTRS | |
| | TMHWVKQAPGQGLEWIGYINPSSAYTNYNQKFQGRVTL | |
| | TADKSTSTAYMELSSLRSEDTAVYYCASPQVHYDYNGFP | |
| | YWGQGTLVTVSS | |
| CD3B2089-N106S | QVQLVQSGAEVKKPGSSVKVSCKASGYTFTRSTMHWVR | 110 |
| HL scFv | QAPGQGLEWMGYINPSSAYTNYAQKFQGRVTLTADKST | |
| | STAYMELSSLRSEDTAVYYCASPQVHYDYSGFPYWGQG | |
| | TLVTVSSGGSEGKSSGSGSESKSTGGSEIVLTQSPATLSAS | |
| | PGERVTLSCSASSSVSYMNWYQQKPGQAPRRWIYDSSKL | |
| | ASGVPARFSGSGSGRDYTLTISSLEPEDFAVYYCQQWSRN | |
| | PPTFGGGTKVEIK | |
| CD3B2089-N106Q | QVQLVQSGAEVKKPGSSVKVSCKASGYTFTRSTMHWVR | 111 |
| HL scFv | QAPGQGLEWMGYINPSSAYTNYAQKFQGRVTLTADKST | |
| | STAYMELSSLRSEDTAVYYCASPQVHYDYQGFPYWGQG | |
| | TLVTVSSGGSEGKSSGSGSESKSTGGSEIVLTQSPATLSAS | |
| | PGERVTLSCSASSSVSYMNWYQQKPGQAPRRWIYDSSKL | |
| | ASGVPARFSGSGSGRDYTLTISSLEPEDFAVYYCQQWSRN | |
| | PPTFGGGTKVEIK | |
| CD3B2089-N106G | QVQLVQSGAEVKKPGSSVKVSCKASGYTFTRSTMHWVR | 112 |
| HL scFv | QAPGQGLEWMGYINPSSAYTNYAQKFQGRVTLTADKST | |
| | STAYMELSSLRSEDTAVYYCASPQVHYDYGGFPYWGQG | |
| | TLVTVSSGGSEGKSSGSGSESKSTGGSEIVLTQSPATLSAS | |
| | PGERVTLSCSASSSVSYMNWYQQKPGQAPRRWIYDSSKL | |
| | ASGVPARFSGSGSGRDYTLTISSLEPEDFAVYYCQQWSRN | |
| | PPTFGGGTKVEIK | |
| CD3B2089-N106A | QVQLVQSGAEVKKPGSSVKVSCKASGYTFTRSTMHWVR | 113 |
| HL scFv | QAPGQGLEWMGYINPSSAYTNYAQKFQGRVTLTADKST | |
| | STAYMELSSLRSEDTAVYYCASPQVHYDYAGFPYWGQG | |
| | TLVTVSSGGSEGKSSGSGSESKSTGGSEIVLTQSPATLSAS | |
| | PGERVTLSCSASSSVSYMNWYQQKPGQAPRRWIYDSSKL | |
| | ASGVPARFSGSGSGRDYTLTISSLEPEDFAVYYCQQWSRN | |
| | PPTFGGGTKVEIK | |
| CD3B2089 | QVQLVQSGAEVKKPGSSVKVSCKASGYTFTRSTMHWVR | 114 |
| HL scFv | QAPGQGLEWMGYINPSSAYTNYAQKFQGRVTLTADKST | |
| | STAYMELSSLRSEDTAVYYCASPQVHYDYNGFPYWGQG | |
| | TLVTVSSGGSEGKSSGSGSESKSTGGSEIVLTQSPATLSAS | |
| | PGERVTLSCSASSSVSYMNWYQQKPGQAPRRWIYDSSKL | |
| | ASGVPARFSGSGSGRDYTLTISSLEPEDFAVYYCQQWSRN | |
| | PPTFGGGTKVEIK | |
| CD3B2051-N106S | QVQLVQSGAEVKKPGSSVKVSCKASGYTFTRSTMHWVK | 115 |
| HL scFv | QAPGQGLEWMGYINPSSAYTNYNQKFQGRVTLTADKST | |
| | STAYMELSSLRSEDTAVYYCASPQVHYDYSGFPYWGQG | |
| | TLVTVSSGGSEGKSSGSGSESKSTGGSEIVLTQSPATLSAS | |
| | PGERVTLSCSASSSVSYMNWYQQKPGQAPRRLIYDSSKL | |
| | ASGVPARFSGSGSGRDYTLTISSLEPEDFAVYYCQQWSRN | |
| | PPTFGGGTKVEIK | |
| CD3B2051-N106Q | QVQLVQSGAEVKKPGSSVKVSCKASGYTFTRSTMHWVK | 116 |
| HL scFv | QAPGQGLEWMGYINPSSAYTNYNQKFQGRVTLTADKST | |
| | STAYMELSSLRSEDTAVYYCASPQVHYDYQGFPYWGQG | |
| | TLVTVSSGGSEGKSSGSGSESKSTGGSEIVLTQSPATLSAS | |
| | PGERVTLSCSASSSVSYMNWYQQKPGQAPRRLIYDSSKL | |
| | ASGVPARFSGSGSGRDYTLTISSLEPEDFAVYYCQQWSRN | |
| | PPTFGGGTKVEIK | |
| CD3B2051-N106G | QVQLVQSGAEVKKPGSSVKVSCKASGYTFTRSTMHWVK | 117 |
| HL scFv | QAPGQGLEWMGYINPSSAYTNYNQKFQGRVTLTADKST | |
| | STAYMELSSLRSEDTAVYYCASPQVHYDYGGFPYWGQG | |
| | TLVTVSSGGSEGKSSGSGSESKSTGGSEIVLTQSPATLSAS | |
| | PGERVTLSCSASSSVSYMNWYQQKPGQAPRRLIYDSSKL | |
| | ASGVPARFSGSGSGRDYTLTISSLEPEDFAVYYCQQWSRN | |
| | PPTFGGGTKVEIK | |
| CD3B2051-N106A | QVQLVQSGAEVKKPGSSVKVSCKASGYTFTRSTMHWVK | 118 |
| HL scFv | QAPGQGLEWMGYINPSSAYTNYNQKFQGRVTLTADKST | |
| | STAYMELSSLRSEDTAVYYCASPQVHYDYAGFPYWGQG | |
| | TLVTVSSGGSEGKSSGSGSESKSTGGSEIVLTQSPATLSAS | |
| | PGERVTLSCSASSSVSYMNWYQQKPGQAPRRLIYDSSKL | |
| | ASGVPARFSGSGSGRDYTLTISSLEPEDFAVYYCQQWSRN | |
| | PPTFGGGTKVEIK | |
| CD3B2051 | QVQLVQSGAEVKKPGSSVKVSCKASGYTFTRSTMHWVK | 119 |
| HL scFv | QAPGQGLEWMGYINPSSAYTNYNQKFQGRVTLTADKST | |
| | STAYMELSSLRSEDTAVYYCASPQVHYDYNGFPYWGQG | |
| | TLVTVSSGGSEGKSSGSGSESKSTGGSEIVLTQSPATLSAS | |
| | PGERVTLSCSASSSVSYMNWYQQKPGQAPRRLIYDSSKL | |
| | ASGVPARFSGSGSGRDYTLTISSLEPEDFAVYYCQQWSRN | |
| | PPTFGGGTKVEIK | |
| CD3B2030-N106S | QVQLVQSGAEVKKPGSSVKVSCKASGYTFTRSTMHWVK | 120 |
| HL scFv | QAPGQGLEWIGYINPSSAYTNYNQKFQGRVTLTADKSTS | |
| | TAYMELSSLRSEDTAVYYCASPQVHYDYSGFPYWGQGT | |
| | LVTVSSGGSEGKSSGSGSESKSTGGSEIVLTQSPATLSASP | |
| | GERVTLSCSASSSVSYMNWYQQKPGQAPRRWIYDSSKL | |
| | ASGVPARFSGSGSGRDYTLTISSLEPEDFAVYYCQQWSRN | |
| | PPTFGGGTKVEIK | |
| CD3B2030-N106G | QVQLVQSGAEVKKPGSSVKVSCKASGYTFTRSTMHWVK | 121 |
| HL scFv | QAPGQGLEWIGYINPSSAYTNYNQKFQGRVTLTADKSTS | |
| | TAYMELSSLRSEDTAVYYCASPQVHYDYGGFPYWGQGT | |
| | LVTVSSGGSEGKSSGSGSESKSTGGSEIVLTQSPATLSASP | |
| | GERVTLSCSASSSVSYMNWYQQKPGQAPRRWIYDSSKL | |
| | ASGVPARFSGSGSGRDYTLTISSLEPEDFAVYYCQQWSRN | |
| | PPTFGGGTKVEIK | |
| CD3B2030-N106A | QVQLVQSGAEVKKPGSSVKVSCKASGYTFTRSTMHWVK | 122 |
| HL scFv | QAPGQGLEWIGYINPSSAYTNYNQKFQGRVTLTADKSTS | |
| | TAYMELSSLRSEDTAVYYCASPQVHYDYAGFPYWGQGT | |
| | LVTVSSGGSEGKSSGSGSESKSTGGSEIVLTQSPATLSASP | |
| | GERVTLSCSASSSVSYMNWYQQKPGQAPRRWIYDSSKL | |
| | ASGVPARFSGSGSGRDYTLTISSLEPEDFAVYYCQQWSRN | |
| | PPTFGGGTKVEIK | |
| CD3B2030 | QVQLVQSGAEVKKPGSSVKVSCKASGYTFTRSTMHWVK | 123 |
| HL scFv | QAPGQGLEWIGYINPSSAYTNYNQKFQGRVTLTADKSTS | |
| | TAYMELSSLRSEDTAVYYCASPQVHYDYNGFPYWGQGT | |
| | LVTVSSGGSEGKSSGSGSESKSTGGSEIVLTQSPATLSASP | |
| | GERVTLSCSASSSVSYMNWYQQKPGQAPRRWIYDSSKL | |
| | ASGVPARFSGSGSGRDYTLTISSLEPEDFAVYYCQQWSRN | |
| | PPTFGGGTKVEIK | |
| CD3B2030-N106Q | EIVLTQSPATLSASPGERVTLSCSASSSVSYMNWYQQKPG | 124 |
| LH scFv | QAPRRWIYDSSKLASGVPARFSGSGSGRDYTLTISSLEPE | |
| | DFAVYYCQQWSRNPPTFGGGTKVEIKGGSEGKSSGSGSE | |
| | SKSTGGSQVQLVQSGAEVKKPGSSVKVSCKASGYTFTRS | |
| | TMHWVKQAPGQGLEWIGYINPSSAYTNYNQKFQGRVTL | |
| | TADKSTSTAYMELSSLRSEDTAVYYCASPQVHYDYQGFP | |
| | YWGQGTLVTVSS | |
| CD3B2030-N106Q | QVQLVQSGAEVKKPGSSVKVSCKASGYTFTRSTMHWVK | 125 |
| HL scFv | QAPGQGLEWIGYINPSSAYTNYNQKFQGRVTLTADKSTS | |
| | TAYMELSSLRSEDTAVYYCASPQVHYDYQGFPYWGQGT | |
| | LVTVSSGGSEGKSSGSGSESKSTGGSEIVLTQSPATLSASP | |
| | GERVTLSCSASSSVSYMNWYQQKPGQAPRRWIYDSSKL | |
| | ASGVPARFSGSGSGRDYTLTISSLEPEDFAVYYCQQWSRN | |
| | PPTFGGGTKVEIK | |
| CD3B2029-N106Q | QVQLVQSGAEVKKPGSSVKVSCKASGYTFTRSTMHWVKQAPGQGLE | 126 |
| HL scFv | WIGYINPSSAYTNYNQKFQGRVTLTADKSTSTAYMELSSLRSEDTAVYY | |
| | CASPQVHYDYQGFPYWGQGTLVTVSSGGSEGKSSGSGSESKSTGGSEI | |
| | VLTQSPATLSASPGERVTLSCSASSSVSYMNWYQQKPGQSPRRWIYDS | |
| | SKLASGVPARFSGSGSGRDYTLTISSLEPEDFAVYYCQQWSRNPPTFGG | |
| | GTKVEIK | |

TABLE 23
CD3 specific scFv-Fc (scFv-hinge CH2-CH3) arms.

| | | SEQ |
|---|---|---|
| | | ID |
| Acronym | Amino acid sequence | NO: |
| CD3B2089- | EIVLTQSPATLSASPGERVTLSCSASSSVSYMNWYQQKPGQAPRRWI | 127 |
| N106S LH | YDSSKLASGVPARFSGSGSGRDYTLTISSLEPEDFAVYYCQQWSRNP | |
| scFv-Fc | PTFGGGTKVEIKGGSEGKSSGSGSESKSTGGSQVQLVQSGAEVKKPG | |
| | SSVKVSCKASGYTFTRSTMHWVRQAPGQGLEWMGYINPSSAYTNY | |
| | AQKFQGRVTLTADKSTSTAYMELSSLRSEDTAVYYCASPQVHYDYS | |
| | GFPYWGQGTLVTVSSEPKSSDKTHTCPPCPAPEAAGGPSVFLFPPKPK | |
| | DTLMISRTPEVTCVVVSVSHEDPEVKFNWYVDGVEVHNAKTKPREE | |
| | QYNSTYRVVSVLTVLHQDWLNGKEYKCKVSNKALPAPIEKTISKAK | |
| | GQPREPQVYVYPPSREEMTKNQVSLTCLVKGFYPSDIAVEWESNGQ | |
| | PENNYKTTPPVLDSDGSFALVSKLTVDKSRWQQGNVFSCSVMHEAL | |
| | HNHYTQKSLSLSPG | |
| CD3B2089- | EIVLTQSPATLSASPGERVTLSCSASSSVSYMNWYQQKPGQAPRRWI | 128 |
| N106Q LH | YDSSKLASGVPARFSGSGSGRDYTLTISSLEPEDFAVYYCQQWSRNP | |
| scFv-Fc | PTFGGGTKVEIKGGSEGKSSGSGSESKSTGGSQVQLVQSGAEVKKPG | |
| | SSVKVSCKASGYTFTRSTMHWVRQAPGQGLEWMGYINPSSAYTNY | |
| | AQKFQGRVTLTADKSTSTAYMELSSLRSEDTAVYYCASPQVHYDYQ | |
| | GFPYWGQGTLVTVSSEPKSSDKTHTCPPCPAPEAAGGPSVFLFPPKPK | |
| | DTLMISRTPEVTCVVVSVSHEDPEVKFNWYVDGVEVHNAKTKPREE | |
| | QYNSTYRVVSVLTVLHQDWLNGKEYKCKVSNKALPAPIEKTISKAK | |
| | GQPREPQVYVYPPSREEMTKNQVSLTCLVKGFYPSDIAVEWESNGQ | |
| | PENNYKTTPPVLDSDGSFALVSKLTVDKSRWQQGNVFSCSVMHEAL | |
| | HNHYTQKSLSLSPG | |
| CD3B2089- | EIVLTQSPATLSASPGERVTLSCSASSSVSYMNWYQQKPGQAPRRWI | 129 |
| N106G LH | YDSSKLASGVPARFSGSGSGRDYTLTISSLEPEDFAVYYCQQWSRNP | |
| scFv-Fc | PTFGGGTKVEIKGGSEGKSSGSGSESKSTGGSQVQLVQSGAEVKKPG | |
| | SSVKVSCKASGYTFTRSTMHWVRQAPGQGLEWMGYINPSSAYTNY | |
| | AQKFQGRVTLTADKSTSTAYMELSSLRSEDTAVYYCASPQVHYDYG | |
| | GFPYWGQGTLVTVSSEPKSSDKTHTCPPCPAPEAAGGPSVFLFPPKPK | |
| | DTLMISRTPEVTCVVVSVSHEDPEVKFNWYVDGVEVHNAKTKPREE | |
| | QYNSTYRVVSVLTVLHQDWLNGKEYKCKVSNKALPAPIEKTISKAK | |
| | GQPREPQVYVYPPSREEMTKNQVSLTCLVKGFYPSDIAVEWESNGQ | |
| | PENNYKTTPPVLDSDGSFALVSKLTVDKSRWQQGNVFSCSVMHEAL | |
| | HNHYTQKSLSLSPG | |
| CD3B2089- | EIVLTQSPATLSASPGERVTLSCSASSSVSYMNWYQQKPGQAPRRWI | 130 |
| N106A LH | YDSSKLASGVPARFSGSGSGRDYTLTISSLEPEDFAVYYCQQWSRNP | |
| scFv-Fc | PTFGGGTKVEIKGGSEGKSSGSGSESKSTGGSQVQLVQSGAEVKKPG | |
| | SSVKVSCKASGYTFTRSTMHWVRQAPGQGLEWMGYINPSSAYTNY | |
| | AQKFQGRVTLTADKSTSTAYMELSSLRSEDTAVYYCASPQVHYDYA | |
| | GFPYWGQGTLVTVSSEPKSSDKTHTCPPCPAPEAAGGPSVFLFPPKPK | |
| | DTLMISRTPEVTCVVVSVSHEDPEVKFNWYVDGVEVHNAKTKPREE | |
| | QYNSTYRVVSVLTVLHQDWLNGKEYKCKVSNKALPAPIEKTISKAK | |
| | GQPREPQVYVYPPSREEMTKNQVSLTCLVKGFYPSDIAVEWESNGQ | |
| | PENNYKTTPPVLDSDGSFALVSKLTVDKSRWQQGNVFSCSVMHEAL | |
| | HNHYTQKSLSLSPG | |
| CD3B2089 | EIVLTQSPATLSASPGERVTLSCSASSSVSYMNWYQQKPGQAPRRWI | 131 |
| LH scFv-Fc | YDSSKLASGVPARFSGSGSGRDYTLTISSLEPEDFAVYYCQQWSRNP | |
| | PTFGGGTKVEIKGGSEGKSSGSGSESKSTGGSQVQLVQSGAEVKKPG | |
| | SSVKVSCKASGYTFTRSTMHWVRQAPGQGLEWMGYINPSSAYTNY | |
| | AQKFQGRVTLTADKSTSTAYMELSSLRSEDTAVYYCASPQVHYDYN | |
| | GFPYWGQGTLVTVSSEPKSSDKTHTCPPCPAPEAAGGPSVFLFPPKPK | |
| | DTLMISRTPEVTCVVVSVSHEDPEVKFNWYVDGVEVHNAKTKPREE | |
| | QYNSTYRVVSVLTVLHQDWLNGKEYKCKVSNKALPAPIEKTISKAK | |
| | GQPREPQVYVYPPSREEMTKNQVSLTCLVKGFYPSDIAVEWESNGQ | |
| | PENNYKTTPPVLDSDGSFALVSKLTVDKSRWQQGNVFSCSVMHEAL | |
| | HNHYTQKSLSLSPG | |
| CD3B2051- | EIVLTQSPATLSASPGERVTLSCSASSSVSYMNWYQQKPGQAPRRLIY | 132 |
| N106S LH | DSSKLASGVPARFSGSGSGRDYTLTISSLEPEDFAVYYCQQWSRNPPT | |
| scFv-Fc | FGGGTKVEIKGGSEGKSSGSGSESKSTGGSQVQLVQSGAEVKKPGSS | |
| | VKVSCKASGYTFTRSTMHWVKQAPGQGLEWMGYINPSSAYTNYNQ | |
| | KFQGRVTLTADKSTSTAYMELSSLRSEDTAVYYCASPQVHYDYSGF | |
| | PYWGQGTLVTVSSEPKSSDKTHTCPPCPAPEAAGGPSVFLFPPKPKD | |
| | TLMISRTPEVTCVVVSVSHEDPEVKFNWYVDGVEVHNAKTKPREEQ | |
| | YNSTYRVVSVLTVLHQDWLNGKEYKCKVSNKALPAPIEKTISKAKG | |
| | QPREPQVYVYPPSREEMTKNQVSLTCLVKGFYPSDIAVEWESNGQPE | |
| | NNYKTTPPVLDSDGSFALVSKLTVDKSRWQQGNVFSCSVMHEALH | |
| | NHYTQKSLSLSPG | |
| CD3B2051- | EIVLTQSPATLSASPGERVTLSCSASSSVSYMNWYQQKPGQAPRRLIY | 133 |
| N106Q LH | DSSKLASGVPARFSGSGSGRDYTLTISSLEPEDFAVYYCQQWSRNPPT | |
| scFv-Fc | FGGGTKVEIKGGSEGKSSGSGSESKSTGGSQVQLVQSGAEVKKPGSS | |
| | VKVSCKASGYTFTRSTMHWVKQAPGQGLEWMGYINPSSAYTNYNQ | |
| | KFQGRVTLTADKSTSTAYMELSSLRSEDTAVYYCASPQVHYDYQGF | |
| | PYWGQGTLVTVSSEPKSSDKTHTCPPCPAPEAAGGPSVFLFPPKPKD | |
| | TLMISRTPEVTCVVVSVSHEDPEVKFNWYVDGVEVHNAKTKPREEQ | |
| | YNSTYRVVSVLTVLHQDWLNGKEYKCKVSNKALPAPIEKTISKAKG | |
| | QPREPQVYVYPPSREEMTKNQVSLTCLVKGFYPSDIAVEWESNGQPE | |
| | NNYKTTPPVLDSDGSFALVSKLTVDKSRWQQGNVFSCSVMHEALH | |
| | NHYTQKSLSLSPG | |
| CD3B2051- | EIVLTQSPATLSASPGERVTLSCSASSSVSYMNWYQQKPGQAPRRLIY | 134 |
| N106G LH | DSSKLASGVPARFSGSGSGRDYTLTISSLEPEDFAVYYCQQWSRNPPT | |
| scFv-Fc | FGGGTKVEIKGGSEGKSSGSGSESKSTGGSQVQLVQSGAEVKKPGSS | |
| | VKVSCKASGYTFTRSTMHWVKQAPGQGLEWMGYINPSSAYTNYNQ | |
| | KFQGRVTLTADKSTSTAYMELSSLRSEDTAVYYCASPQVHYDYGGF | |
| | PYWGQGTLVTVSSEPKSSDKTHTCPPCPAPEAAGGPSVFLFPPKPKD | |
| | TLMISRTPEVTCVVVSVSHEDPEVKFNWYVDGVEVHNAKTKPREEQ | |
| | YNSTYRVVSVLTVLHQDWLNGKEYKCKVSNKALPAPIEKTISKAKG | |
| | QPREPQVYVYPPSREEMTKNQVSLTCLVKGFYPSDIAVEWESNGQPE | |
| | NNYKTTPPVLDSDGSFALVSKLTVDKSRWQQGNVFSCSVMHEALH | |
| | NHYTQKSLSLSPG | |
| CD3B2051- | EIVLTQSPATLSASPGERVTLSCSASSSVSYMNWYQQKPGQAPRRLIY | 135 |
| N106A LH | DSSKLASGVPARFSGSGSGRDYTLTISSLEPEDFAVYYCQQWSRNPPT | |
| scFv-Fc | FGGGTKVEIKGGSEGKSSGSGSESKSTGGSQVQLVQSGAEVKKPGSS | |
| | VKVSCKASGYTFTRSTMHWVKQAPGQGLEWMGYINPSSAYTNYNQ | |
| | KFQGRVTLTADKSTSTAYMELSSLRSEDTAVYYCASPQVHYDYAGF | |
| | PYWGQGTLVTVSSEPKSSDKTHTCPPCPAPEAAGGPSVFLFPPKPKD | |
| | TLMISRTPEVTCVVVSVSHEDPEVKFNWYVDGVEVHNAKTKPREEQ | |
| | YNSTYRVVSVLTVLHQDWLNGKEYKCKVSNKALPAPIEKTISKAKG | |
| | QPREPQVYVYPPSREEMTKNQVSLTCLVKGFYPSDIAVEWESNGQPE | |
| | NNYKTTPPVLDSDGSFALVSKLTVDKSRWQQGNVFSCSVMHEALH | |
| | NHYTQKSLSLSPG | |
| CD3B2051 | EIVLTQSPATLSASPGERVTLSCSASSSVSYMNWYQQKPGQAPRRLIY | 136 |
| LH scFv-Fc | DSSKLASGVPARFSGSGSGRDYTLTISSLEPEDFAVYYCQQWSRNPPT | |
| | FGGGTKVEIKGGSEGKSSGSGSESKSTGGSQVQLVQSGAEVKKPGSS | |
| | VKVSCKASGYTFTRSTMHWVKQAPGQGLEWMGYINPSSAYTNYNQ | |
| | KFQGRVTLTADKSTSTAYMELSSLRSEDTAVYYCASPQVHYDYNGF | |
| | PYWGQGTLVTVSSEPKSSDKTHTCPPCPAPEAAGGPSVFLFPPKPKD | |
| | TLMISRTPEVTCVVVSVSHEDPEVKFNWYVDGVEVHNAKTKPREEQ | |
| | YNSTYRVVSVLTVLHQDWLNGKEYKCKVSNKALPAPIEKTISKAKG | |
| | QPREPQVYVYPPSREEMTKNQVSLTCLVKGFYPSDIAVEWESNGQPE | |
| | NNYKTTPPVLDSDGSFALVSKLTVDKSRWQQGNVFSCSVMHEALH | |
| | NHYTQKSLSLSPG | |
| CD3B2030- | EIVLTQSPATLSASPGERVTLSCSASSSVSYMNWYQQKPGQAPRRWI | 137 |
| N106S LH | YDSSKLASGVPARFSGSGSGRDYTLTISSLEPEDFAVYYCQQWSRNP | |
| scFv-Fc | PTFGGGTKVEIKGGSEGKSSGSGSESKSTGGSQVQLVQSGAEVKKPG | |
| | SSVKVSCKASGYTFTRSTMHWVKQAPGQGLEWIGYINPSSAYTNYN | |
| | QKFQGRVTLTADKSTSTAYMELSSLRSEDTAVYYCASPQVHYDYSG | |
| | FPYWGQGTLVTVSSEPKSSDKTHTCPPCPAPEAAGGPSVFLFPPKPKD | |
| | TLMISRTPEVTCVVVSVSHEDPEVKFNWYVDGVEVHNAKTKPREEQ | |
| | YNSTYRVVSVLTVLHQDWLNGKEYKCKVSNKALPAPIEKTISKAKG | |
| | QPREPQVYVYPPSREEMTKNQVSLTCLVKGFYPSDIAVEWESNGQPE | |
| | NNYKTTPPVLDSDGSFALVSKLTVDKSRWQQGNVFSCSVMHEALH | |
| | NHYTQKSLSLSPG | |
| CD3B2030- | EIVLTQSPATLSASPGERVTLSCSASSSVSYMNWYQQKPGQAPRRWI | 138 |
| N106G LH | YDSSKLASGVPARFSGSGSGRDYTLTISSLEPEDFAVYYCQQWSRNP | |
| scFv-Fc | PTFGGGTKVEIKGGSEGKSSGSGSESKSTGGSQVQLVQSGAEVKKPG | |
| | SSVKVSCKASGYTFTRSTMHWVKQAPGQGLEWIGYINPSSAYTNYN | |
| | QKFQGRVTLTADKSTSTAYMELSSLRSEDTAVYYCASPQVHYDYGG | |
| | FPYWGQGTLVTVSSEPKSSDKTHTCPPCPAPEAAGGPSVFLFPPKPKD | |
| | TLMISRTPEVTCVVVSVSHEDPEVKFNWYVDGVEVHNAKTKPREEQ | |
| | YNSTYRVVSVLTVLHQDWLNGKEYKCKVSNKALPAPIEKTISKAKG | |
| | QPREPQVYVYPPSREEMTKNQVSLTCLVKGFYPSDIAVEWESNGQPE | |
| | NNYKTTPPVLDSDGSFALVSKLTVDKSRWQQGNVFSCSVMHEALH | |
| | NHYTQKSLSLSPG | |
| CD3B2030- | EIVLTQSPATLSASPGERVTLSCSASSSVSYMNWYQQKPGQAPRRWI | 139 |
| N106A LH | YDSSKLASGVPARFSGSGSGRDYTLTISSLEPEDFAVYYCQQWSRNP | |
| scFv-Fc | PTFGGGTKVEIKGGSEGKSSGSGSESKSTGGSQVQLVQSGAEVKKPG | |
| | SSVKVSCKASGYTFTRSTMHWVKQAPGQGLEWIGYINPSSAYTNYN | |
| | QKFQGRVTLTADKSTSTAYMELSSLRSEDTAVYYCASPQVHYDYAG | |
| | FPYWGQGTLVTVSSEPKSSDKTHTCPPCPAPEAAGGPSVFLFPPKPKD | |
| | TLMISRTPEVTCVVVSVSHEDPEVKFNWYVDGVEVHNAKTKPREEQ | |
| | YNSTYRVVSVLTVLHQDWLNGKEYKCKVSNKALPAPIEKTISKAKG | |
| | QPREPQVYVYPPSREEMTKNQVSLTCLVKGFYPSDIAVEWESNGQPE | |
| | NNYKTTPPVLDSDGSFALVSKLTVDKSRWQQGNVFSCSVMHEALH | |
| | NHYTQKSLSLSPG | |
| CD3B2030 | EIVLTQSPATLSASPGERVTLSCSASSSVSYMNWYQQKPGQAPRRWI | 140 |
| LH scFv-Fc | YDSSKLASGVPARFSGSGSGRDYTLTISSLEPEDFAVYYCQQWSRNP | |
| | PTFGGGTKVEIKGGSEGKSSGSGSESKSTGGSQVQLVQSGAEVKKPG | |
| | SSVKVSCKASGYTFTRSTMHWVKQAPGQGLEWIGYINPSSAYTNYN | |
| | QKFQGRVTLTADKSTSTAYMELSSLRSEDTAVYYCASPQVHYDYNG | |
| | FPYWGQGTLVTVSSEPKSSDKTHTCPPCPAPEAAGGPSVFLFPPKPKD | |
| | TLMISRTPEVTCVVVSVSHEDPEVKFNWYVDGVEVHNAKTKPREEQ | |
| | YNSTYRVVSVLTVLHQDWLNGKEYKCKVSNKALPAPIEKTISKAKG | |
| | QPREPQVYVYPPSREEMTKNQVSLTCLVKGFYPSDIAVEWESNGQPE | |
| | NNYKTTPPVLDSDGSFALVSKLTVDKSRWQQGNVFSCSVMHEALH | |
| | NHYTQKSLSLSPG | |
| CD3B2089- | QVQLVQSGAEVKKPGSSVKVSCKASGYTFTRSTMHWVRQAPGQGL | 141 |
| N106S HL | EWMGYINPSSAYTNYAQKFQGRVTLTADKSTSTAYMELSSLRSEDT | |
| scFv-Fc | AVYYCASPQVHYDYSGFPYWGQGTLVTVSSGGSEGKSSGSGSESKS | |
| | TGGSEIVLTQSPATLSASPGERVTLSCSASSSVSYMNWYQQKPGQAP | |
| | RRWIYDSSKLASGVPARFSGSGSGRDYTLTISSLEPEDFAVYYCQQW | |
| | SRNPPTFGGGTKVEIKEPKSSDKTHTCPPCPAPEAAGGPSVFLFPPKP | |
| | KDTLMISRTPEVTCVVVSVSHEDPEVKFNWYVDGVEVHNAKTKPRE | |
| | EQYNSTYRVVSVLTVLHQDWLNGKEYKCKVSNKALPAPIEKTISKA | |
| | KGQPREPQVYVYPPSREEMTKNQVSLTCLVKGFYPSDIAVEWESNG | |
| | QPENNYKTTPPVLDSDGSFALVSKLTVDKSRWQQGNVFSCSVMHEA | |
| | LHNHYTQKSLSLSPG | |
| CD3B2089- | QVQLVQSGAEVKKPGSSVKVSCKASGYTFTRSTMHWVRQAPGQGL | 142 |
| N106Q HL | EWMGYINPSSAYTNYAQKFQGRVTLTADKSTSTAYMELSSLRSEDT | |
| scFv-Fc | AVYYCASPQVHYDYQGFPYWGQGTLVTVSSGGSEGKSSGSGSESKS | |
| | TGGSEIVLTQSPATLSASPGERVTLSCSASSSVSYMNWYQQKPGQAP | |
| | RRWIYDSSKLASGVPARFSGSGSGRDYTLTISSLEPEDFAVYYCQQW | |
| | SRNPPTFGGGTKVEIKEPKSSDKTHTCPPCPAPEAAGGPSVFLFPPKP | |
| | KDTLMISRTPEVTCVVVSVSHEDPEVKFNWYVDGVEVHNAKTKPRE | |
| | EQYNSTYRVVSVLTVLHQDWLNGKEYKCKVSNKALPAPIEKTISKA | |
| | KGQPREPQVYVYPPSREEMTKNQVSLTCLVKGFYPSDIAVEWESNG | |
| | QPENNYKTTPPVLDSDGSFALVSKLTVDKSRWQQGNVFSCSVMHEA | |
| | LHNHYTQKSLSLSPG | |
| CD3B2089- | QVQLVQSGAEVKKPGSSVKVSCKASGYTFTRSTMHWVRQAPGQGL | 143 |
| N106G HL | EWMGYINPSSAYTNYAQKFQGRVTLTADKSTSTAYMELSSLRSEDT | |
| scFv-Fc | AVYYCASPQVHYDYGGFPYWGQGTLVTVSSGGSEGKSSGSGSESKS | |
| | TGGSEIVLTQSPATLSASPGERVTLSCSASSSVSYMNWYQQKPGQAP | |
| | RRWIYDSSKLASGVPARFSGSGSGRDYTLTISSLEPEDFAVYYCQQW | |
| | SRNPPTFGGGTKVEIKEPKSSDKTHTCPPCPAPEAAGGPSVFLFPPKP | |
| | KDTLMISRTPEVTCVVVSVSHEDPEVKFNWYVDGVEVHNAKTKPRE | |
| | EQYNSTYRVVSVLTVLHQDWLNGKEYKCKVSNKALPAPIEKTISKA | |
| | KGQPREPQVYVYPPSREEMTKNQVSLTCLVKGFYPSDIAVEWESNG | |
| | QPENNYKTTPPVLDSDGSFALVSKLTVDKSRWQQGNVFSCSVMHEA | |
| | LHNHYTQKSLSLSPG | |
| CD3B2089- | QVQLVQSGAEVKKPGSSVKVSCKASGYTFTRSTMHWVRQAPGQGL | 144 |
| N106A HL | EWMGYINPSSAYTNYAQKFQGRVTLTADKSTSTAYMELSSLRSEDT | |
| scFv-Fc | AVYYCASPQVHYDYAGFPYWGQGTLVTVSSGGSEGKSSGSGSESKS | |
| | TGGSEIVLTQSPATLSASPGERVTLSCSASSSVSYMNWYQQKPGQAP | |
| | RRWIYDSSKLASGVPARFSGSGSGRDYTLTISSLEPEDFAVYYCQQW | |
| | SRNPPTFGGGTKVEIKEPKSSDKTHTCPPCPAPEAAGGPSVFLFPPKP | |
| | KDTLMISRTPEVTCVVVSVSHEDPEVKFNWYVDGVEVHNAKTKPRE | |
| | EQYNSTYRVVSVLTVLHQDWLNGKEYKCKVSNKALPAPIEKTISKA | |
| | KGQPREPQVYVYPPSREEMTKNQVSLTCLVKGFYPSDIAVEWESNG | |
| | QPENNYKTTPPVLDSDGSFALVSKLTVDKSRWQQGNVFSCSVMHEA | |
| | LHNHYTQKSLSLSPG | |
| CD3B2089 | QVQLVQSGAEVKKPGSSVKVSCKASGYTFTRSTMHWVRQAPGQGL | 145 |
| HL scFv-Fc | EWMGYINPSSAYTNYAQKFQGRVTLTADKSTSTAYMELSSLRSEDT | |
| | AVYYCASPQVHYDYNGFPYWGQGTLVTVSSGGSEGKSSGSGSESKS | |
| | TGGSEIVLTQSPATLSASPGERVTLSCSASSSVSYMNWYQQKPGQAP | |
| | RRWIYDSSKLASGVPARFSGSGSGRDYTLTISSLEPEDFAVYYCQQW | |
| | SRNPPTFGGGTKVEIKEPKSSDKTHTCPPCPAPEAAGGPSVFLFPPKP | |
| | KDTLMISRTPEVTCVVVSVSHEDPEVKFNWYVDGVEVHNAKTKPRE | |
| | EQYNSTYRVVSVLTVLHQDWLNGKEYKCKVSNKALPAPIEKTISKA | |
| | KGQPREPQVYVYPPSREEMTKNQVSLTCLVKGFYPSDIAVEWESNG | |
| | QPENNYKTTPPVLDSDGSFALVSKLTVDKSRWQQGNVFSCSVMHEA | |
| | LHNHYTQKSLSLSPG | |
| CD3B2051- | QVQLVQSGAEVKKPGSSVKVSCKASGYTFTRSTMHWVKQAPGQGL | 146 |
| N106S HL | EWMGYINPSSAYTNYNQKFQGRVTLTADKSTSTAYMELSSLRSEDT | |
| scFv-Fc | AVYYCASPQVHYDYSGFPYWGQGTLVTVSSGGSEGKSSGSGSESKS | |
| | TGGSEIVLTQSPATLSASPGERVTLSCSASSSVSYMNWYQQKPGQAP | |
| | RRLIYDSSKLASGVPARFSGSGSGRDYTLTISSLEPEDFAVYYCQQWS | |
| | RNPPTFGGGTKVEIKEPKSSDKTHTCPPCPAPEAAGGPSVFLFPPKPK | |
| | DTLMISRTPEVTCVVVSVSHEDPEVKFNWYVDGVEVHNAKTKPREE | |
| | QYNSTYRVVSVLTVLHQDWLNGKEYKCKVSNKALPAPIEKTISKAK | |
| | GQPREPQVYVYPPSREEMTKNQVSLTCLVKGFYPSDIAVEWESNGQ | |
| | PENNYKTTPPVLDSDGSFALVSKLTVDKSRWQQGNVFSCSVMHEAL | |
| | HNHYTQKSLSLSPG | |
| CD3B2051- | QVQLVQSGAEVKKPGSSVKVSCKASGYTFTRSTMHWVKQAPGQGL | 147 |
| N106Q HL | EWMGYINPSSAYTNYNQKFQGRVTLTADKSTSTAYMELSSLRSEDT | |
| scFv-Fc | AVYYCASPQVHYDYQGFPYWGQGTLVTVSSGGSEGKSSGSGSESKS | |
| | TGGSEIVLTQSPATLSASPGERVTLSCSASSSVSYMNWYQQKPGQAP | |
| | RRLIYDSSKLASGVPARFSGSGSGRDYTLTISSLEPEDFAVYYCQQWS | |
| | RNPPTFGGGTKVEIKEPKSSDKTHTCPPCPAPEAAGGPSVFLFPPKPK | |
| | DTLMISRTPEVTCVVVSVSHEDPEVKFNWYVDGVEVHNAKTKPREE | |
| | QYNSTYRVVSVLTVLHQDWLNGKEYKCKVSNKALPAPIEKTISKAK | |
| | GQPREPQVYVYPPSREEMTKNQVSLTCLVKGFYPSDIAVEWESNGQ | |
| | PENNYKTTPPVLDSDGSFALVSKLTVDKSRWQQGNVFSCSVMHEAL | |
| | HNHYTQKSLSLSPG | |
| CD3B2051- | QVQLVQSGAEVKKPGSSVKVSCKASGYTFTRSTMHWVKQAPGQGL | 148 |
| N106G HL | EWMGYINPSSAYTNYNQKFQGRVTLTADKSTSTAYMELSSLRSEDT | |
| scFv-Fc | AVYYCASPQVHYDYGGFPYWGQGTLVTVSSGGSEGKSSGSGSESKS | |
| | TGGSEIVLTQSPATLSASPGERVTLSCSASSSVSYMNWYQQKPGQAP | |
| | RRLIYDSSKLASGVPARFSGSGSGRDYTLTISSLEPEDFAVYYCQQWS | |
| | RNPPTFGGGTKVEIKEPKSSDKTHTCPPCPAPEAAGGPSVFLFPPKPK | |
| | DTLMISRTPEVTCVVVSVSHEDPEVKFNWYVDGVEVHNAKTKPREE | |
| | QYNSTYRVVSVLTVLHQDWLNGKEYKCKVSNKALPAPIEKTISKAK | |
| | GQPREPQVYVYPPSREEMTKNQVSLTCLVKGFYPSDIAVEWESNGQ | |
| | PENNYKTTPPVLDSDGSFALVSKLTVDKSRWQQGNVFSCSVMHEAL | |
| | HNHYTQKSLSLSPG | |
| CD3B2051- | QVQLVQSGAEVKKPGSSVKVSCKASGYTFTRSTMHWVKQAPGQGL | 149 |
| N106A HL | EWMGYINPSSAYTNYNQKFQGRVTLTADKSTSTAYMELSSLRSEDT | |
| scFv-Fc | AVYYCASPQVHYDYAGFPYWGQGTLVTVSSGGSEGKSSGSGSESKS | |
| | TGGSEIVLTQSPATLSASPGERVTLSCSASSSVSYMNWYQQKPGQAP | |
| | RRLIYDSSKLASGVPARFSGSGSGRDYTLTISSLEPEDFAVYYCQQWS | |
| | RNPPTFGGGTKVEIKEPKSSDKTHTCPPCPAPEAAGGPSVFLFPPKPK | |
| | DTLMISRTPEVTCVVVSVSHEDPEVKFNWYVDGVEVHNAKTKPREE | |
| | QYNSTYRVVSVLTVLHQDWLNGKEYKCKVSNKALPAPIEKTISKAK | |
| | GQPREPQVYVYPPSREEMTKNQVSLTCLVKGFYPSDIAVEWESNGQ | |
| | PENNYKTTPPVLDSDGSFALVSKLTVDKSRWQQGNVFSCSVMHEAL | |
| | HNHYTQKSLSLSPG | |
| CD3B2051 | QVQLVQSGAEVKKPGSSVKVSCKASGYTFTRSTMHWVKQAPGQGL | 150 |
| HL scFv-Fc | EWMGYINPSSAYTNYNQKFQGRVTLTADKSTSTAYMELSSLRSEDT | |
| | AVYYCASPQVHYDYNGFPYWGQGTLVTVSSGGSEGKSSGSGSESKS | |
| | TGGSEIVLTQSPATLSASPGERVTLSCSASSSVSYMNWYQQKPGQAP | |
| | RRLIYDSSKLASGVPARFSGSGSGRDYTLTISSLEPEDFAVYYCQQWS | |
| | RNPPTFGGGTKVEIKEPKSSDKTHTCPPCPAPEAAGGPSVFLFPPKPK | |
| | DTLMISRTPEVTCVVVSVSHEDPEVKFNWYVDGVEVHNAKTKPREE | |
| | QYNSTYRVVSVLTVLHQDWLNGKEYKCKVSNKALPAPIEKTISKAK | |
| | GQPREPQVYVYPPSREEMTKNQVSLTCLVKGFYPSDIAVEWESNGQ | |
| | PENNYKTTPPVLDSDGSFALVSKLTVDKSRWQQGNVFSCSVMHEAL | |
| | HNHYTQKSLSLSPG | |
| CD3B2030- | QVQLVQSGAEVKKPGSSVKVSCKASGYTFTRSTMHWVKQAPGQGL | 151 |
| N106S HL | EWIGYINPSSAYTNYNQKFQGRVTLTADKSTSTAYMELSSLRSEDTA | |
| scFv-Fc | VYYCASPQVHYDYSGFPYWGQGTLVTVSSGGSEGKSSGSGSESKST | |
| | GGSEIVLTQSPATLSASPGERVTLSCSASSSVSYMNWYQQKPGQAPR | |
| | RWIYDSSKLASGVPARFSGSGSGRDYTLTISSLEPEDFAVYYCQQWS | |
| | RNPPTFGGGTKVEIKEPKSSDKTHTCPPCPAPEAAGGPSVFLFPPKPK | |
| | DTLMISRTPEVTCVVVSVSHEDPEVKFNWYVDGVEVHNAKTKPREE | |
| | QYNSTYRVVSVLTVLHQDWLNGKEYKCKVSNKALPAPIEKTISKAK | |
| | GQPREPQVYVYPPSREEMTKNQVSLTCLVKGFYPSDIAVEWESNGQ | |
| | PENNYKTTPPVLDSDGSFALVSKLTVDKSRWQQGNVFSCSVMHEAL | |
| | HNHYTQKSLSLSPG | |
| CD3B2030- | QVQLVQSGAEVKKPGSSVKVSCKASGYTFTRSTMHWVKQAPGQGL | 152 |
| N106G HL | EWIGYINPSSAYTNYNQKFQGRVTLTADKSTSTAYMELSSLRSEDTA | |
| scFv-Fc | VYYCASPQVHYDYGGFPYWGQGTLVTVSSGGSEGKSSGSGSESKST | |
| | GGSEIVLTQSPATLSASPGERVTLSCSASSSVSYMNWYQQKPGQAPR | |
| | RWIYDSSKLASGVPARFSGSGSGRDYTLTISSLEPEDFAVYYCQQWS | |
| | RNPPTFGGGTKVEIKEPKSSDKTHTCPPCPAPEAAGGPSVFLFPPKPK | |
| | DTLMISRTPEVTCVVVSVSHEDPEVKFNWYVDGVEVHNAKTKPREE | |
| | QYNSTYRVVSVLTVLHQDWLNGKEYKCKVSNKALPAPIEKTISKAK | |
| | GQPREPQVYVYPPSREEMTKNQVSLTCLVKGFYPSDIAVEWESNGQ | |
| | PENNYKTTPPVLDSDGSFALVSKLTVDKSRWQQGNVFSCSVMHEAL | |
| | HNHYTQKSLSLSPG | |
| CD3B2030- | QVQLVQSGAEVKKPGSSVKVSCKASGYTFTRSTMHWVKQAPGQGL | 153 |
| N106A HL | EWIGYINPSSAYTNYNQKFQGRVTLTADKSTSTAYMELSSLRSEDTA | |
| scFv-Fc | VYYCASPQVHYDYAGFPYWGQGTLVTVSSGGSEGKSSGSGSESKST | |
| | GGSEIVLTQSPATLSASPGERVTLSCSASSSVSYMNWYQQKPGQAPR | |
| | RWIYDSSKLASGVPARFSGSGSGRDYTLTISSLEPEDFAVYYCQQWS | |
| | RNPPTFGGGTKVEIKEPKSSDKTHTCPPCPAPEAAGGPSVFLFPPKPK | |
| | DTLMISRTPEVTCVVVSVSHEDPEVKFNWYVDGVEVHNAKTKPREE | |
| | QYNSTYRVVSVLTVLHQDWLNGKEYKCKVSNKALPAPIEKTISKAK | |
| | GQPREPQVYVYPPSREEMTKNQVSLTCLVKGFYPSDIAVEWESNGQ | |
| | PENNYKTTPPVLDSDGSFALVSKLTVDKSRWQQGNVFSCSVMHEAL | |
| | HNHYTQKSLSLSPG | |
| CD3B2030 | QVQLVQSGAEVKKPGSSVKVSCKASGYTFTRSTMHWVKQAPGQGL | 154 |
| HL scFv-Fc | EWIGYINPSSAYTNYNQKFQGRVTLTADKSTSTAYMELSSLRSEDTA | |
| | VYYCASPQVHYDYNGFPYWGQGTLVTVSSGGSEGKSSGSGSESKST | |
| | GGSEIVLTQSPATLSASPGERVTLSCSASSSVSYMNWYQQKPGQAPR | |
| | RWIYDSSKLASGVPARFSGSGSGRDYTLTISSLEPEDFAVYYCQQWS | |
| | RNPPTFGGGTKVEIKEPKSSDKTHTCPPCPAPEAAGGPSVFLFPPKPK | |
| | DTLMISRTPEVTCVVVSVSHEDPEVKFNWYVDGVEVHNAKTKPREE | |
| | QYNSTYRVVSVLTVLHQDWLNGKEYKCKVSNKALPAPIEKTISKAK | |
| | GQPREPQVYVYPPSREEMTKNQVSLTCLVKGFYPSDIAVEWESNGQ | |
| | PENNYKTTPPVLDSDGSFALVSKLTVDKSRWQQGNVFSCSVMHEAL | |
| | HNHYTQKSLSLSPG | |
| CD3B2030- | EIVLTQSPATLSASPGERVTLSCSASSSVSYMNWYQQKPGQAPRRWI | 155 |
| N106Q LH | YDSSKLASGVPARFSGSGSGRDYTLTISSLEPEDFAVYYCQQWSRNP | |
| scFv-Fc | PTFGGGTKVEIKGGSEGKSSGSGSESKSTGGSQVQLVQSGAEVKKPG | |
| | SSVKVSCKASGYTFTRSTMHWVKQAPGQGLEWIGYINPSSAYTNYN | |
| | QKFQGRVTLTADKSTSTAYMELSSLRSEDTAVYYCASPQVHYDYQG | |
| | FPYWGQGTLVTVSSEPKSSDKTHTCPPCPAPEAAGGPSVFLFPPKPKD | |
| | TLMISRTPEVTCVVVSVSHEDPEVKFNWYVDGVEVHNAKTKPREEQ | |
| | YNSTYRVVSVLTVLHQDWLNGKEYKCKVSNKALPAPIEKTISKAKG | |
| | QPREPQVYVYPPSREEMTKNQVSLTCLVKGFYPSDIAVEWESNGQPE | |
| | NNYKTTPPVLDSDGSFALVSKLTVDKSRWQQGNVFSCSVMHEALH | |
| | NHYTQKSLSLSPG | |
| CD3B2030- | QVQLVQSGAEVKKPGSSVKVSCKASGYTFTRSTMHWVKQAPGQGL | 156 |
| N106Q HL | EWIGYINPSSAYTNYNQKFQGRVTLTADKSTSTAYMELSSLRSEDTA | |
| scFv-Fc | VYYCASPQVHYDYQGFPYWGQGTLVTVSSGGSEGKSSGSGSESKST | |
| | GGSEIVLTQSPATLSASPGERVTLSCSASSSVSYMNWYQQKPGQAPR | |
| | RWIYDSSKLASGVPARFSGSGSGRDYTLTISSLEPEDFAVYYCQQWS | |
| | RNPPTFGGGTKVEIKEPKSSDKTHTCPPCPAPEAAGGPSVFLFPPKPK | |
| | DTLMISRTPEVTCVVVSVSHEDPEVKFNWYVDGVEVHNAKTKPREE | |
| | QYNSTYRVVSVLTVLHQDWLNGKEYKCKVSNKALPAPIEKTISKAK | |
| | GQPREPQVYVYPPSREEMTKNQVSLTCLVKGFYPSDIAVEWESNGQ | |
| | PENNYKTTPPVLDSDGSFALVSKLTVDKSRWQQGNVFSCSVMHEAL | |
| | HNHYTQKSLSLSPG | |
| CD3B2029- | QVQLVQSGAEVKKPGSSVKVSCKASGYTFTRSTMHWVKQAPGQGL | 157 |
| N106Q HL | EWIGYINPSSAYTNYNQKFQGRVTLTADKSTSTAYMELSSLRSEDTA | |
| scFv-Fc | VYYCASPQVHYDYQGFPYWGQGTLVTVSSGGSEGKSSGSGSESKST | |
| | GGSEIVLTQSPATLSASPGERVTLSCSASSSVSYMNWYQQKPGQSPR | |
| | RWIYDSSKLASGVPARFSGSGSGRDYTLTISSLEPEDFAVYYCQQWS | |
| | RNPPTFGGGTKVEIKEPKSSDKTHTCPPCPAPEAAGGPSVFLFPPKPK | |
| | DTLMISRTPEVTCVVVSVSHEDPEVKFNWYVDGVEVHNAKTKPREE | |
| | QYNSTYRVVSVLTVLHQDWLNGKEYKCKVSNKALPAPIEKTISKAK | |
| | GQPREPQVYVYPPSREEMTKNQVSLTCLVKGFYPSDIAVEWESNGQ | |
| | PENNYKTTPPVLDSDGSFALVSKLTVDKSRWQQGNVFSCSVMHEAL | |
| | HNHYTQKSLSLSPG | |

TABLE 24
DNA SEQ ID NOs for anti-CD3 scFv and scFv-hinge-CH2-CH3 (scFv-Fc)

| | scFv-Fc DNA | scFv DNA |
|---|---|---|
| Acronym | (SEQ ID NO:) | (SEQ ID NO:) |
| CD3B2089- | GAGATTGTACTGACACAGTCCCCAGCAACCTTGTCCGCTTC | GAGATTGTACTGACACAGTCC |
| N106S- | TCCCGGCGAAAGGGTCACTCTCTCCTGCTCCGCTAGTTCTT | CCAGCAACCTTGTCCGCTTCTC |
| LH-scFv | CAGTGTCATATATGAATTGGTACCAACAAAAGCCAGGTCA | CCGGCGAAAGGGTCACTCTCT |
| | GGCTCCAAGAAGATGGATTTACGATTCCTCCAAGTTGGCTT | CCTGCTCCGCTAGTTCTTCAGT |
| | CTGGTGTCCCTGCACGATTTAGCGGGTCAGGGTCAGGGCG | GTCATATATGAATTGGTACCA |
| | CGATTACACACTCACAATTAGTAGTCTCGAACCCGAGGACT | ACAAAAGCCAGGTCAGGCTCC |
| | TTGCCGTATATTACTGTCAGCAATGGAGTCGGAATCCCCCA | AAGAAGATGGATTTACGATTC |
| | ACTTTCGGCGGGGGAACAAAAGTAGAAATAAAAGGCGGC | CTCCAAGTTGGCTTCTGGTGTC |
| | TCCGAGGGCAAGAGCAGCGGCAGCGGCAGCGAGAGCAA | CCTGCACGATTTAGCGGGTCA |
| | GAGCACCGGCGGCAGCCAAGTGCAGTTGGTCCAGTCAGG | GGGTCAGGGCGCGATTACACA |
| | CGCAGAAGTGAAGAAGCCCGGCTCAAGCGTCAAGGTATC | CTCACAATTAGTAGTCTCGAAC |
| | ATGTAAGGCTTCTGGATATACTTTCACCCGAAGCACAATGC | CCGAGGACTTTGCCGTATATT |
| | ACTGGGTTCGCCAGGCCCCTGGACAGGGTCTTGAGTGGAT | ACTGTCAGCAATGGAGTCGGA |
| | GGGGTATATCAACCCATCCTCAGCATATACTAACTATGCTC | ATCCCCCAACTTTCGGCGGGG |
| | AGAAGTTTCAGGGGCGTGTCACTTTGACCGCCGATAAGTC | GAACAAAAGTAGAAATAAAA |
| | CACAAGCACCGCTTATATGGAACTGTCTTCATTGCGCTCTG | GGCGGCTCCGAGGGCAAGAG |
| | AAGACACTGCAGTGTACTATTGCGCCAGCCCACAGGTCCA | CAGCGGCAGCGGCAGCGAGA |
| | CTACGACTATTCTGGATTTCCATACTGGGGGCAGGGGACC | GCAAGAGCACCGGCGGCAGC |
| | TTGGTGACTGTAAGCTCTGAGCCCAAATCTAGCGACAAAA | CAAGTGCAGTTGGTCCAGTCA |
| | CTCACACATGTCCACCGTGCCCAGCACCTGAAGCAGCAGG | GGCGCAGAAGTGAAGAAGCC |
| | GGGACCGTCAGTCTTCCTCTTCCCCCCAAAACCCAAGGACA | CGGCTCAAGCGTCAAGGTATC |
| | CCCTCATGATCTCCCGGACCCCTGAGGTCACATGCGTGGT | ATGTAAGGCTTCTGGATATAC |
| | GGTGAGCGTGAGCCACGAAGACCCTGAGGTCAAGTTCAA | TTTCACCCGAAGCACAATGCA |
| | CTGGTACGTGGACGGCGTGGAGGTGCATAATGCCAAGAC | CTGGGTTCGCCAGGCCCCTGG |
| | AAAGCCGCGGGAGGAGCAGTACAACAGCACGTACCGTGT | ACAGGGTCTTGAGTGGATGG |
| | GGTCAGCGTCCTCACCGTCCTGCACCAGGACTGGCTGAAT | GGTATATCAACCCATCCTCAGC |
| | GGCAAGGAGTACAAGTGCAAGGTCTCCAACAAAGCCCTCC | ATATACTAACTATGCTCAGAA |
| | CAGCCCCCATCGAGAAAACCATCTCCAAAGCCAAAGGGCA | GTTTCAGGGGCGTGTCACTTT |
| | GCCCCGAGAACCACAGGTGTACGTGTACCCCCCATCCCGG | GACCGCCGATAAGTCCACAAG |
| | GAGGAGATGACCAAGAACCAGGTCAGCCTGACCTGCCTG | CACCGCTTATATGGAACTGTCT |
| | GTCAAAGGCTTCTATCCCAGCGACATCGCCGTGGAGTGGG | TCATTGCGCTCTGAAGACACT |
| | AGAGCAATGGGCAGCCGGAGAACAACTACAAGACCACGC | GCAGTGTACTATTGCGCCAGC |
| | CTCCCGTGCTGGACTCCGACGGCTCCTTCGCCCTCGTGAGC | CCACAGGTCCACTACGACTATT |
| | AAGCTCACCGTGGACAAGTCTAGATGGCAGCAGGGGAAC | CTGGATTTCCATACTGGGGGC |
| | GTCTTCTCATGCTCCGTGATGCATGAGGCTCTGCACAACCA | AGGGGACCTTGGTGACTGTAA |
| | CTACACGCAGAAGAGCCTCTCCCTGTCTCCGGGT | GCTCTG |
| | (158) | (159) |
| CD3B2089- | GAGATCGTACTGACCCAAAGTCCCGCCACTCTCTCTGCTAG | GAGATCGTACTGACCCAAAGT |
| N106Q- | CCCAGGCGAGAGAGTTACCTTGTCTTGCTCTGCTAGTTCAA | CCCGCCACTCTCTCTGCTAGCC |
| LH-scFv | GTGTCAGTTATATGAACTGGTATCAGCAGAAGCCAGGACA | CAGGCGAGAGAGTTACCTTGT |
| | GGCACCTCGAAGATGGATATATGACTCCTCCAAACTCGCA | CTTGCTCTGCTAGTTCAAGTGT |
| | TCAGGCGTACCAGCACGCTTTTCTGGGAGCGGTAGTGGTA | CAGTTATATGAACTGGTATCA |
| | GGGATTATACACTCACCATCTCTAGTTTGGAACCAGAAGAT | GCAGAAGCCAGGACAGGCAC |
| | TTCGCTGTGTACTATTGCCAGCAGTGGAGCCGCAACCCTCC | CTCGAAGATGGATATATGACT |
| | TACCTTCGGCGGTGGGACAAAGGTAGAAATAAAAGGCGG | CCTCCAAACTCGCATCAGGCG |
| | CTCCGAGGGCAAGAGCAGCGGCAGCGGCAGCGAGAGCA | TACCAGCACGCTTTTCTGGGA |
| | AGAGCACCGGCGGCAGCCAAGTGCAGTTGGTTCAATCCG | GCGGTAGTGGTAGGGATTATA |
| | GCGCTGAAGTGAAGAAACCTGGGTCATCTGTCAAAGTATC | CACTCACCATCTCTAGTTTGGA |
| | CTGTAAAGCCTCTGGGTACACTTTTACACGTAGCACCATGC | ACCAGAAGATTTCGCTGTGTA |
| | ACTGGGTCCGTCAAGCCCCTGGGCAAGGCCTTGAGTGGAT | CTATTGCCAGCAGTGGAGCCG |
| | GGGTTATATAAACCCATCCTCCGCATACACAAATTACGCTC | CAACCCTCCTACCTTCGGCGGT |
| | AAAAATTTCAAGGGCGAGTCACTCTCACTGCCGATAAATC | GGGACAAAGGTAGAAATAAA |
| | CACTTCAACTGCCTATATGGAGCTTAGTTCATTGCGATCAG | AGGCGGCTCCGAGGGCAAGA |
| | AAGATACTGCAGTCTATTATTGTGCATCACCTCAGGTCCAT | GCAGCGGCAGCGGCAGCGAG |
| | TACGACTACCAAGGGTTCCCCTACTGGGGACAGGGGACTT | AGCAAGAGCACCGGCGGCAG |
| | TGGTAACTGTGTCTTCTGAGCCCAAATCTAGCGACAAAACT | CCAAGTGCAGTTGGTTCAATC |
| | CACACATGTCCACCGTGCCCAGCACCTGAAGCAGCAGGGG | CGGCGCTGAAGTGAAGAAAC |
| | GACCGTCAGTCTTCCTCTTCCCCCCAAAACCCAAGGACACC | CTGGGTCATCTGTCAAAGTAT |
| | CTCATGATCTCCCGGACCCCTGAGGTCACATGCGTGGTGG | CCTGTAAAGCCTCTGGGTACA |
| | TGAGCGTGAGCCACGAAGACCCTGAGGTCAAGTTCAACTG | CTTTTACACGTAGCACCATGCA |
| | GTACGTGGACGGCGTGGAGGTGCATAATGCCAAGACAAA | CTGGGTCCGTCAAGCCCCTGG |
| | GCCGCGGGAGGAGCAGTACAACAGCACGTACCGTGTGGT | GCAAGGCCTTGAGTGGATGG |
| | CAGCGTCCTCACCGTCCTGCACCAGGACTGGCTGAATGGC | GTTATATAAACCCATCCTCCGC |
| | AAGGAGTACAAGTGCAAGGTCTCCAACAAAGCCCTCCCAG | ATACACAAATTACGCTCAAAA |
| | CCCCCATCGAGAAAACCATCTCCAAAGCCAAAGGGCAGCC | ATTTCAAGGGCGAGTCACTCT |
| | CCGAGAACCACAGGTGTACGTGTACCCCCCATCCCGGGAG | CACTGCCGATAAATCCACTTCA |
| | GAGATGACCAAGAACCAGGTCAGCCTGACCTGCCTGGTCA | ACTGCCTATATGGAGCTTAGTT |
| | AAGGCTTCTATCCCAGCGACATCGCCGTGGAGTGGGAGA | CATTGCGATCAGAAGATACTG |
| | GCAATGGGCAGCCGGAGAACAACTACAAGACCACGCCTC | CAGTCTATTATTGTGCATCACC |
| | CCGTGCTGGACTCCGACGGCTCCTTCGCCCTCGTGAGCAA | TCAGGTCCATTACGACTACCA |
| | GCTCACCGTGGACAAGTCTAGATGGCAGCAGGGGAACGT | AGGGTTCCCCTACTGGGGACA |
| | CTTCTCATGCTCCGTGATGCATGAGGCTCTGCACAACCACT | GGGGACTTTGGTAACTGTGTC |
| | ACACGCAGAAGAGCCTCTCCCTGTCTCCGGGT | TTCTG |
| | (160) | (161) |
| CD3B2089- | GAGATCGTATTGACACAATCACCCGCCACATTGTCAGCTA | GAGATCGTATTGACACAATCA |
| N106G- | GCCCCGGTGAGCGCGTCACACTTTCTTGTAGTGCATCAAG | CCCGCCACATTGTCAGCTAGC |
| LH-scFv | TAGCGTTTCTTACATGAATTGGTATCAGCAGAAACCAGGA | CCCGGTGAGCGCGTCACACTT |
| | CAAGCACCACGGCGATGGATATACGATTCTAGCAAACTCG | TCTTGTAGTGCATCAAGTAGC |
| | CCAGTGGCGTCCCCGCTCGATTCTCCGGGTCTGGCAGTGG | GTTTCTTACATGAATTGGTATC |
| | TAGAGATTATACACTCACTATCAGTTCTCTGGAACCAGAAG | AGCAGAAACCAGGACAAGCA |
| | ACTTCGCAGTCTATTACTGTCAACAATGGTCACGGAATCCC | CCACGGCGATGGATATACGAT |
| | CCCACATTCGGTGGTGGCACCAAGGTTGAAATTAAGGGCG | TCTAGCAAACTCGCCAGTGGC |
| | GCTCCGAGGGCAAGAGCAGCGGCAGCGGCAGCGAGAGC | GTCCCCGCTCGATTCTCCGGG |
| | AAGAGCACCGGCGGCAGCCAAGTTCAGCTTGTGCAGAGC | TCTGGCAGTGGTAGAGATTAT |
| | GGGGCAGAGGTGAAGAAACCCGGATCAAGCGTCAAAGTT | ACACTCACTATCAGTTCTCTGG |
| | TCTTGTAAAGCTAGTGGATATACTTTCACACGCTCAACTAT | AACCAGAAGACTTCGCAGTCT |
| | GCACTGGGTGAGACAAGCTCCTGGTCAGGGCCTGGAGTG | ATTACTGTCAACAATGGTCAC |
| | GATGGGGTACATAAATCCCTCCAGTGCATATACTAACTATG | GGAATCCCCCCACATTCGGTG |
| | CTCAAAAGTTCCAAGGCCGCGTAACTCTCACTGCCGATAA | GTGGCACCAAGGTTGAAATTA |
| | GTCCACCAGCACTGCCTACATGGAACTGTCTAGTTTGCGAT | AGGGCGGCTCCGAGGGCAAG |
| | CCGAGGACACCGCCGTGTACTACTGTGCTTCACCTCAAGTA | AGCAGCGGCAGCGGCAGCGA |
| | CATTATGACTACGGGGGATTTCCCTACTGGGGCCAAGGTA | GAGCAAGAGCACCGGCGGCA |
| | CTTTGGTCACAGTCTCAAGCGAGCCCAAATCTAGCGACAA | GCCAAGTTCAGCTTGTGCAGA |
| | AACTCACACATGTCCACCGTGCCCAGCACCTGAAGCAGCA | GCGGGGCAGAGGTGAAGAAA |
| | GGGGGACCGTCAGTCTTCCTCTTCCCCCCAAAACCCAAGG | CCCGGATCAAGCGTCAAAGTT |
| | ACACCCTCATGATCTCCCGGACCCCTGAGGTCACATGCGTG | TCTTGTAAAGCTAGTGGATAT |
| | GTGGTGAGCGTGAGCCACGAAGACCCTGAGGTCAAGTTC | ACTTTCACACGCTCAACTATGC |
| | AACTGGTACGTGGACGGCGTGGAGGTGCATAATGCCAAG | ACTGGGTGAGACAAGCTCCTG |
| | ACAAAGCCGCGGGAGGAGCAGTACAACAGCACGTACCGT | GTCAGGGCCTGGAGTGGATG |
| | GTGGTCAGCGTCCTCACCGTCCTGCACCAGGACTGGCTGA | GGGTACATAAATCCCTCCAGT |
| | ATGGCAAGGAGTACAAGTGCAAGGTCTCCAACAAAGCCCT | GCATATACTAACTATGCTCAAA |
| | CCCAGCCCCCATCGAGAAAACCATCTCCAAAGCCAAAGGG | AGTTCCAAGGCCGCGTAACTC |
| | CAGCCCCGAGAACCACAGGTGTACGTGTACCCCCCATCCC | TCACTGCCGATAAGTCCACCA |
| | GGGAGGAGATGACCAAGAACCAGGTCAGCCTGACCTGCC | GCACTGCCTACATGGAACTGT |
| | TGGTCAAAGGCTTCTATCCCAGCGACATCGCCGTGGAGTG | CTAGTTTGCGATCCGAGGACA |
| | GGAGAGCAATGGGCAGCCGGAGAACAACTACAAGACCAC | CCGCCGTGTACTACTGTGCTTC |
| | GCCTCCCGTGCTGGACTCCGACGGCTCCTTCGCCCTCGTGA | ACCTCAAGTACATTATGACTAC |
| | GCAAGCTCACCGTGGACAAGTCTAGATGGCAGCAGGGGA | GGGGGATTTCCCTACTGGGGC |
| | ACGTCTTCTCATGCTCCGTGATGCATGAGGCTCTGCACAAC | CAAGGTACTTTGGTCACAGTC |
| | CACTACACGCAGAAGAGCCTCTCCCTGTCTCCGGGT | TCAAGCG |
| | (162) | (163) |
| CD3B2089- | GAAATAGTGCTGACCCAGAGCCCCGCTACCCTTTCTGCAA | GAAATAGTGCTGACCCAGAGC |
| N106A- | GTCCTGGGGAACGTGTTACATTGTCTTGTAGCGCTTCTTCA | CCCGCTACCCTTTCTGCAAGTC |
| LH-scFv | TCAGTCTCCTATATGAATTGGTATCAACAAAAACCAGGACA | CTGGGGAACGTGTTACATTGT |
| | AGCTCCTCGGCGGTGGATCTACGACAGTTCCAAACTTGCCT | CTTGTAGCGCTTCTTCATCAGT |
| | CTGGTGTGCCTGCTCGGTTTAGTGGGTCTGGAAGTGGACG | CTCCTATATGAATTGGTATCAA |
| | AGATTATACTCTGACCATCAGTTCCTTGGAACCCGAGGATT | CAAAAACCAGGACAAGCTCCT |
| | TTGCTGTTTATTACTGCCAACAATGGAGTAGAAACCCTCCA | CGGCGGTGGATCTACGACAGT |
| | ACCTTTGGAGGTGGAACTAAGGTCGAGATAAAGGGCGGC | TCCAAACTTGCCTCTGGTGTGC |
| | TCCGAGGGCAAGAGCAGCGGCAGCGGCAGCGAGAGCAA | CTGCTCGGTTTAGTGGGTCTG |
| | GAGCACCGGCGGCAGCCAAGTGCAATTGGTCCAAAGTGG | GAAGTGGACGAGATTATACTC |
| | AGCTGAAGTAAAAAAACCCGGCTCCTCTGTGAAGGTCAGT | TGACCATCAGTTCCTTGGAACC |
| | TGCAAAGCCTCAGGGTACACCTTTACTAGGTCAACAATGC | CGAGGATTTTGCTGTTTATTAC |
| | ACTGGGTGCGACAAGCTCCCGGTCAGGGTTTGGAGTGGA | TGCCAACAATGGAGTAGAAAC |
| | TGGGATACATAAACCCCTCATCAGCCTACACAAATTATGCA | CCTCCAACCTTTGGAGGTGGA |
| | CAAAAATTTCAGGGTCGGGTTACACTCACCGCCGACAAAT | ACTAAGGTCGAGATAAAGGG |
| | CCACTTCCACTGCTTATATGGAACTTTCCTCTCTCCGCAGTG | CGGCTCCGAGGGCAAGAGCA |
| | AGGACACAGCAGTGTACTATTGTGCCTCCCCTCAAGTGCAT | GCGGCAGCGGCAGCGAGAGC |
| | TATGACTACGCTGGTTTCCCTTACTGGGGACAAGGTACTCT | AAGAGCACCGGCGGCAGCCA |
| | GGTTACAGTTTCTTCCGAGCCCAAATCTAGCGACAAAACTC | AGTGCAATTGGTCCAAAGTGG |
| | ACACATGTCCACCGTGCCCAGCACCTGAAGCAGCAGGGG | AGCTGAAGTAAAAAAACCCGG |
| | GACCGTCAGTCTTCCTCTTCCCCCCAAAACCCAAGGACACC | CTCCTCTGTGAAGGTCAGTTG |
| | CTCATGATCTCCCGGACCCCTGAGGTCACATGCGTGGTGG | CAAAGCCTCAGGGTACACCTT |
| | TGAGCGTGAGCCACGAAGACCCTGAGGTCAAGTTCAACTG | TACTAGGTCAACAATGCACTG |
| | GTACGTGGACGGCGTGGAGGTGCATAATGCCAAGACAAA | GGTGCGACAAGCTCCCGGTCA |
| | GCCGCGGGAGGAGCAGTACAACAGCACGTACCGTGTGGT | GGGTTTGGAGTGGATGGGAT |
| | CAGCGTCCTCACCGTCCTGCACCAGGACTGGCTGAATGGC | ACATAAACCCCTCATCAGCCTA |
| | AAGGAGTACAAGTGCAAGGTCTCCAACAAAGCCCTCCCAG | CACAAATTATGCACAAAAATTT |
| | CCCCCATCGAGAAAACCATCTCCAAAGCCAAAGGGCAGCC | CAGGGTCGGGTTACACTCACC |
| | CCGAGAACCACAGGTGTACGTGTACCCCCCATCCCGGGAG | GCCGACAAATCCACTTCCACT |
| | GAGATGACCAAGAACCAGGTCAGCCTGACCTGCCTGGTCA | GCTTATATGGAACTTTCCTCTC |
| | AAGGCTTCTATCCCAGCGACATCGCCGTGGAGTGGGAGA | TCCGCAGTGAGGACACAGCAG |
| | GCAATGGGCAGCCGGAGAACAACTACAAGACCACGCCTC | TGTACTATTGTGCCTCCCCTCA |
| | CCGTGCTGGACTCCGACGGCTCCTTCGCCCTCGTGAGCAA | AGTGCATTATGACTACGCTGG |
| | GCTCACCGTGGACAAGTCTAGATGGCAGCAGGGGAACGT | TTTCCCTTACTGGGGACAAGG |
| | CTTCTCATGCTCCGTGATGCATGAGGCTCTGCACAACCACT | TACTCTGGTTACAGTTTCTTCC |
| | ACACGCAGAAGAGCCTCTCCCTGTCTCCGGGT | G |
| | (164) | (165) |
| CD3B2089- | GAAATCGTTCTCACACAGAGCCCTGCAACATTGTCAGCTTC | GAAATCGTTCTCACACAGAGC |
| LH-scFv | ACCCGGTGAACGAGTAACATTGTCCTGTTCTGCCTCAAGTA | CCTGCAACATTGTCAGCTTCAC |
| | GTGTGAGCTATATGAATTGGTATCAACAAAAACCAGGGCA | CCGGTGAACGAGTAACATTGT |
| | GGCCCCTAGAAGGTGGATCTATGATTCAAGCAAACTGGCA | CCTGTTCTGCCTCAAGTAGTGT |
| | TCCGGCGTCCCTGCCCGCTTTAGTGGAAGCGGTTCAGGAA | GAGCTATATGAATTGGTATCA |
| | GGGACTATACTCTTACTATCTCCAGCCTTGAACCTGAAGAT | ACAAAAACCAGGGCAGGCCCC |
| | TTTGCAGTCTACTACTGCCAACAATGGTCTAGGAATCCCCC | TAGAAGGTGGATCTATGATTC |
| | CACTTTTGGTGGAGGGACCAAAGTTGAGATCAAAGGCGG | AAGCAAACTGGCATCCGGCGT |
| | CTCCGAGGGCAAGAGCAGCGGCAGCGGCAGCGAGAGCA | CCCTGCCCGCTTTAGTGGAAG |
| | AGAGCACCGGCGGCAGCCAGGTACAACTCGTGCAAAGTG | CGGTTCAGGAAGGGACTATAC |
| | GTGCTGAAGTGAAGAAACCTGGATCAAGCGTCAAGGTATC | TCTTACTATCTCCAGCCTTGAA |
| | CTGTAAAGCATCAGGATACACCTTCACACGCAGTACTATGC | CCTGAAGATTTTGCAGTCTACT |
| | ATTGGGTGCGTCAAGCCCCCGGACAGGGCCTGGAATGGA | ACTGCCAACAATGGTCTAGGA |
| | TGGGCTACATAAACCCTTCTTCCGCCTACACCAATTATGCC | ATCCCCCCACTTTTGGTGGAG |
| | CAAAAGTTCCAGGGAAGGGTGACTCTGACTGCTGATAAAA | GGACCAAAGTTGAGATCAAAG |
| | GTACTAGCACCGCATACATGGAACTGTCTTCACTGAGAAG | GCGGCTCCGAGGGCAAGAGC |
| | CGAGGACACCGCCGTCTATTATTGTGCATCCCCCCAAGTCC | AGCGGCAGCGGCAGCGAGAG |
| | ACTATGATTACAACGGATTTCCTTACTGGGGCCAGGGAAC | CAAGAGCACCGGCGGCAGCC |
| | CTTGGTCACCGTGTCTTCCGAGCCCAAATCTAGCGACAAAA | AGGTACAACTCGTGCAAAGTG |
| | CTCACACATGTCCACCGTGCCCAGCACCTGAAGCAGCAGG | GTGCTGAAGTGAAGAAACCTG |
| | GGGACCGTCAGTCTTCCTCTTCCCCCCAAAACCCAAGGACA | GATCAAGCGTCAAGGTATCCT |
| | CCCTCATGATCTCCCGGACCCCTGAGGTCACATGCGTGGT | GTAAAGCATCAGGATACACCT |
| | GGTGAGCGTGAGCCACGAAGACCCTGAGGTCAAGTTCAA | TCACACGCAGTACTATGCATT |
| | CTGGTACGTGGACGGCGTGGAGGTGCATAATGCCAAGAC | GGGTGCGTCAAGCCCCCGGAC |
| | AAAGCCGCGGGAGGAGCAGTACAACAGCACGTACCGTGT | AGGGCCTGGAATGGATGGGC |
| | GGTCAGCGTCCTCACCGTCCTGCACCAGGACTGGCTGAAT | TACATAAACCCTTCTTCCGCCT |
| | GGCAAGGAGTACAAGTGCAAGGTCTCCAACAAAGCCCTCC | ACACCAATTATGCCCAAAAGT |
| | CAGCCCCCATCGAGAAAACCATCTCCAAAGCCAAAGGGCA | TCCAGGGAAGGGTGACTCTGA |
| | GCCCCGAGAACCACAGGTGTACGTGTACCCCCCATCCCGG | CTGCTGATAAAAGTACTAGCA |
| | GAGGAGATGACCAAGAACCAGGTCAGCCTGACCTGCCTG | CCGCATACATGGAACTGTCTTC |
| | GTCAAAGGCTTCTATCCCAGCGACATCGCCGTGGAGTGGG | ACTGAGAAGCGAGGACACCG |
| | AGAGCAATGGGCAGCCGGAGAACAACTACAAGACCACGC | CCGTCTATTATTGTGCATCCCC |
| | CTCCCGTGCTGGACTCCGACGGCTCCTTCGCCCTCGTGAGC | CCAAGTCCACTATGATTACAAC |
| | AAGCTCACCGTGGACAAGTCTAGATGGCAGCAGGGGAAC | GGATTTCCTTACTGGGGCCAG |
| | GTCTTCTCATGCTCCGTGATGCATGAGGCTCTGCACAACCA | GGAACCTTGGTCACCGTGTCT |
| | CTACACGCAGAAGAGCCTCTCCCTGTCTCCGGGT | TCCG |
| | (166) | (167) |
| CD3B2051- | GAGATTGTACTCACCCAGTCTCCAGCTACCCTTAGTGCTTC | GAGATTGTACTCACCCAGTCTC |
| N106S- | ACCTGGTGAGCGCGTGACATTGTCCTGCTCCGCAAGCTCC | CAGCTACCCTTAGTGCTTCACC |
| LH-scFv | AGTGTTTCATATATGAATTGGTACCAACAAAAGCCTGGGC | TGGTGAGCGCGTGACATTGTC |
| | AAGCACCACGCCGGCTGATCTACGACAGCTCCAAGCTCGC | CTGCTCCGCAAGCTCCAGTGTT |
| | AAGCGGTGTACCTGCTCGCTTTTCCGGCAGCGGGTCAGGT | TCATATATGAATTGGTACCAAC |
| | CGAGATTATACTCTGACCATTTCATCACTCGAACCCGAAGA | AAAAGCCTGGGCAAGCACCAC |
| | CTTTGCAGTGTATTACTGTCAACAGTGGAGTAGGAATCCA | GCCGGCTGATCTACGACAGCT |
| | CCAACATTTGGGGGTGGCACCAAGGTTGAGATAAAGGGC | CCAAGCTCGCAAGCGGTGTAC |
| | GGCTCCGAGGGCAAGAGCAGCGGCAGCGGCAGCGAGAG | CTGCTCGCTTTTCCGGCAGCG |
| | CAAGAGCACCGGCGGCAGCCAAGTGCAACTCGTACAATCT | GGTCAGGTCGAGATTATACTC |
| | GGCGCTGAGGTTAAGAAACCTGGTAGCTCTGTTAAAGTGT | TGACCATTTCATCACTCGAACC |
| | CTTGTAAAGCATCCGGGTATACTTTTACCCGGTCAACTATG | CGAAGACTTTGCAGTGTATTA |
| | CACTGGGTAAAACAAGCTCCTGGACAAGGTTTGGAGTGG | CTGTCAACAGTGGAGTAGGAA |
| | ATGGGTTATATAAATCCCTCCTCAGCATACACTAACTACAA | TCCACCAACATTTGGGGGTGG |
| | CCAGAAGTTCCAGGGGCGCGTTACCCTGACTGCCGATAAG | CACCAAGGTTGAGATAAAGG |
| | AGTACTTCAACTGCTTATATGGAGCTGTCATCCCTGCGTAG | GCGGCTCCGAGGGCAAGAGC |
| | CGAGGACACAGCAGTATACTACTGCGCCAGTCCACAGGTA | AGCGGCAGCGGCAGCGAGAG |
| | CACTACGATTACAGTGGCTTTCCATACTGGGGGCAGGGCA | CAAGAGCACCGGCGGCAGCC |
| | CTCTGGTAACAGTATCTAGTGAGCCCAAATCTAGCGACAA | AAGTGCAACTCGTACAATCTG |
| | AACTCACACATGTCCACCGTGCCCAGCACCTGAAGCAGCA | GCGCTGAGGTTAAGAAACCTG |
| | GGGGGACCGTCAGTCTTCCTCTTCCCCCCAAAACCCAAGG | GTAGCTCTGTTAAAGTGTCTTG |
| | ACACCCTCATGATCTCCCGGACCCCTGAGGTCACATGCGTG | TAAAGCATCCGGGTATACTTTT |
| | GTGGTGAGCGTGAGCCACGAAGACCCTGAGGTCAAGTTC | ACCCGGTCAACTATGCACTGG |
| | AACTGGTACGTGGACGGCGTGGAGGTGCATAATGCCAAG | GTAAAACAAGCTCCTGGACAA |
| | ACAAAGCCGCGGGAGGAGCAGTACAACAGCACGTACCGT | GGTTTGGAGTGGATGGGTTAT |
| | GTGGTCAGCGTCCTCACCGTCCTGCACCAGGACTGGCTGA | ATAAATCCCTCCTCAGCATACA |
| | ATGGCAAGGAGTACAAGTGCAAGGTCTCCAACAAAGCCCT | CTAACTACAACCAGAAGTTCC |
| | CCCAGCCCCCATCGAGAAAACCATCTCCAAAGCCAAAGGG | AGGGGCGCGTTACCCTGACTG |
| | CAGCCCCGAGAACCACAGGTGTACGTGTACCCCCCATCCC | CCGATAAGAGTACTTCAACTG |
| | GGGAGGAGATGACCAAGAACCAGGTCAGCCTGACCTGCC | CTTATATGGAGCTGTCATCCCT |
| | TGGTCAAAGGCTTCTATCCCAGCGACATCGCCGTGGAGTG | GCGTAGCGAGGACACAGCAG |
| | GGAGAGCAATGGGCAGCCGGAGAACAACTACAAGACCAC | TATACTACTGCGCCAGTCCACA |
| | GCCTCCCGTGCTGGACTCCGACGGCTCCTTCGCCCTCGTGA | GGTACACTACGATTACAGTGG |
| | GCAAGCTCACCGTGGACAAGTCTAGATGGCAGCAGGGGA | CTTTCCATACTGGGGGCAGGG |
| | ACGTCTTCTCATGCTCCGTGATGCATGAGGCTCTGCACAAC | CACTCTGGTAACAGTATCTAGT |
| | CACTACACGCAGAAGAGCCTCTCCCTGTCTCCGGGT | G |
| | (168) | (169) |
| CD3B2051- | GAGATCGTGTTGACTCAAAGTCCTGCAACCCTGTCTGCTAG | GAGATCGTGTTGACTCAAAGT |
| N106Q- | TCCAGGGGAGAGGGTTACTCTCAGTTGTTCTGCAAGCAGT | CCTGCAACCCTGTCTGCTAGTC |
| LH-scFv | AGCGTATCCTACATGAACTGGTATCAACAAAAGCCTGGTC | CAGGGGAGAGGGTTACTCTCA |
| | AGGCACCACGGCGGTTGATATATGACTCCTCCAAGTTGGC | GTTGTTCTGCAAGCAGTAGCG |
| | CTCTGGGGTGCCCGCAAGATTCTCCGGGTCCGGCTCTGGC | TATCCTACATGAACTGGTATCA |
| | CGCGATTACACACTGACTATAAGCAGTCTGGAACCAGAGG | ACAAAAGCCTGGTCAGGCACC |
| | ATTTTGCCGTTTACTACTGCCAACAATGGAGCCGAAACCCC | ACGGCGGTTGATATATGACTC |
| | CCAACCTTTGGAGGTGGCACTAAGGTAGAGATAAAGGGC | CTCCAAGTTGGCCTCTGGGGT |
| | GGCTCCGAGGGCAAGAGCAGCGGCAGCGGCAGCGAGAG | GCCCGCAAGATTCTCCGGGTC |
| | CAAGAGCACCGGCGGCAGCCAGGTACAGTTGGTCCAAAG | CGGCTCTGGCCGCGATTACAC |
| | TGGCGCAGAGGTAAAGAAACCAGGTTCTTCAGTCAAGGTA | ACTGACTATAAGCAGTCTGGA |
| | AGTTGCAAGGCATCTGGATATACATTTACCCGCAGTACTAT | ACCAGAGGATTTTGCCGTTTA |
| | GCATTGGGTCAAACAGGCTCCAGGACAGGGGCTTGAATG | CTACTGCCAACAATGGAGCCG |
| | GATGGGTTACATCAACCCATCTAGTGCCTATACAAACTATA | AAACCCCCCAACCTTTGGAGG |
| | ATCAGAAATTTCAGGGCAGAGTGACTCTGACAGCCGACAA | TGGCACTAAGGTAGAGATAAA |
| | ATCAACCTCTACAGCATATATGGAGTTGTCCTCTCTCCGTA | GGGCGGCTCCGAGGGCAAGA |
| | GTGAAGATACTGCCGTCTACTATTGTGCAAGCCCCCAAGTC | GCAGCGGCAGCGGCAGCGAG |
| | CACTATGATTATCAGGGTTTCCCTTACTGGGGGCAGGGTA | AGCAAGAGCACCGGCGGCAG |
| | CTTTGGTTACCGTTTCATCCGAGCCCAAATCTAGCGACAAA | CCAGGTACAGTTGGTCCAAAG |
| | ACTCACACATGTCCACCGTGCCCAGCACCTGAAGCAGCAG | TGGCGCAGAGGTAAAGAAAC |
| | GGGGACCGTCAGTCTTCCTCTTCCCCCCAAAACCCAAGGAC | CAGGTTCTTCAGTCAAGGTAA |
| | ACCCTCATGATCTCCCGGACCCCTGAGGTCACATGCGTGGT | GTTGCAAGGCATCTGGATATA |
| | GGTGAGCGTGAGCCACGAAGACCCTGAGGTCAAGTTCAA | CATTTACCCGCAGTACTATGCA |
| | CTGGTACGTGGACGGCGTGGAGGTGCATAATGCCAAGAC | TTGGGTCAAACAGGCTCCAGG |
| | AAAGCCGCGGGAGGAGCAGTACAACAGCACGTACCGTGT | ACAGGGGCTTGAATGGATGG |
| | GGTCAGCGTCCTCACCGTCCTGCACCAGGACTGGCTGAAT | GTTACATCAACCCATCTAGTGC |
| | GGCAAGGAGTACAAGTGCAAGGTCTCCAACAAAGCCCTCC | CTATACAAACTATAATCAGAA |
| | CAGCCCCCATCGAGAAAACCATCTCCAAAGCCAAAGGGCA | ATTTCAGGGCAGAGTGACTCT |
| | GCCCCGAGAACCACAGGTGTACGTGTACCCCCCATCCCGG | GACAGCCGACAAATCAACCTC |
| | GAGGAGATGACCAAGAACCAGGTCAGCCTGACCTGCCTG | TACAGCATATATGGAGTTGTC |
| | GTCAAAGGCTTCTATCCCAGCGACATCGCCGTGGAGTGGG | CTCTCTCCGTAGTGAAGATACT |
| | AGAGCAATGGGCAGCCGGAGAACAACTACAAGACCACGC | GCCGTCTACTATTGTGCAAGC |
| | CTCCCGTGCTGGACTCCGACGGCTCCTTCGCCCTCGTGAGC | CCCCAAGTCCACTATGATTATC |
| | AAGCTCACCGTGGACAAGTCTAGATGGCAGCAGGGGAAC | AGGGTTTCCCTTACTGGGGGC |
| | GTCTTCTCATGCTCCGTGATGCATGAGGCTCTGCACAACCA | AGGGTACTTTGGTTACCGTTTC |
| | CTACACGCAGAAGAGCCTCTCCCTGTCTCCGGGT | ATCCG |
| | (170) | (171) |
| CD3B2051- | GAAATTGTTCTTACACAAAGTCCTGCTACACTGTCAGCCAG | GAAATTGTTCTTACACAAAGTC |
| N106G- | CCCCGGTGAGCGAGTCACATTGTCATGCTCTGCTTCCAGTA | CTGCTACACTGTCAGCCAGCC |
| LH-scFv | GTGTGAGCTACATGAACTGGTACCAACAGAAACCTGGTCA | CCGGTGAGCGAGTCACATTGT |
| | GGCTCCAAGGCGCTTGATATACGACAGCAGCAAACTGGCA | CATGCTCTGCTTCCAGTAGTGT |
| | AGTGGTGTACCTGCTCGGTTTTCTGGATCAGGCTCAGGTA | GAGCTACATGAACTGGTACCA |
| | GAGACTATACTCTCACCATTTCCTCTCTGGAACCTGAGGAC | ACAGAAACCTGGTCAGGCTCC |
| | TTTGCTGTTTATTATTGCCAGCAGTGGAGTCGCAACCCTCC | AAGGCGCTTGATATACGACAG |
| | CACCTTCGGTGGAGGGACAAAAGTAGAAATAAAGGGCGG | CAGCAAACTGGCAAGTGGTGT |
| | CTCCGAGGGCAAGAGCAGCGGCAGCGGCAGCGAGAGCA | ACCTGCTCGGTTTTCTGGATCA |
| | AGAGCACCGGCGGCAGCCAAGTTCAACTGGTCCAAAGCG | GGCTCAGGTAGAGACTATACT |
| | GTGCTGAAGTTAAAAAGCCAGGAAGCAGTGTTAAAGTCTC | CTCACCATTTCCTCTCTGGAAC |
| | ATGTAAGGCCAGCGGTTACACTTTTACTAGGAGTACCATG | CTGAGGACTTTGCTGTTTATTA |
| | CACTGGGTGAAGCAGGCCCCCGGTCAGGGTCTTGAGTGG | TTGCCAGCAGTGGAGTCGCAA |
| | ATGGGATATATAAACCCATCATCCGCCTACACTAATTACAA | CCCTCCCACCTTCGGTGGAGG |
| | CCAAAAGTTTCAGGGTCGCGTGACTTTGACCGCCGACAAA | GACAAAAGTAGAAATAAAGG |
| | TCTACCAGCACAGCCTACATGGAACTCAGTTCTCTCCGATC | GCGGCTCCGAGGGCAAGAGC |
| | CGAAGATACCGCTGTATATTACTGTGCTTCCCCACAAGTAC | AGCGGCAGCGGCAGCGAGAG |
| | ACTATGATTACGGGGGCTTCCCATACTGGGGCCAGGGAAC | CAAGAGCACCGGCGGCAGCC |
| | TCTCGTCACAGTATCATCCGAGCCCAAATCTAGCGACAAAA | AAGTTCAACTGGTCCAAAGCG |
| | CTCACACATGTCCACCGTGCCCAGCACCTGAAGCAGCAGG | GTGCTGAAGTTAAAAAGCCAG |
| | GGGACCGTCAGTCTTCCTCTTCCCCCCAAAACCCAAGGACA | GAAGCAGTGTTAAAGTCTCAT |
| | CCCTCATGATCTCCCGGACCCCTGAGGTCACATGCGTGGT | GTAAGGCCAGCGGTTACACTT |
| | GGTGAGCGTGAGCCACGAAGACCCTGAGGTCAAGTTCAA | TTACTAGGAGTACCATGCACT |
| | CTGGTACGTGGACGGCGTGGAGGTGCATAATGCCAAGAC | GGGTGAAGCAGGCCCCCGGT |
| | AAAGCCGCGGGAGGAGCAGTACAACAGCACGTACCGTGT | CAGGGTCTTGAGTGGATGGG |
| | GGTCAGCGTCCTCACCGTCCTGCACCAGGACTGGCTGAAT | ATATATAAACCCATCATCCGCC |
| | GGCAAGGAGTACAAGTGCAAGGTCTCCAACAAAGCCCTCC | TACACTAATTACAACCAAAAG |
| | CAGCCCCCATCGAGAAAACCATCTCCAAAGCCAAAGGGCA | TTTCAGGGTCGCGTGACTTTG |
| | GCCCCGAGAACCACAGGTGTACGTGTACCCCCCATCCCGG | ACCGCCGACAAATCTACCAGC |
| | GAGGAGATGACCAAGAACCAGGTCAGCCTGACCTGCCTG | ACAGCCTACATGGAACTCAGT |
| | GTCAAAGGCTTCTATCCCAGCGACATCGCCGTGGAGTGGG | TCTCTCCGATCCGAAGATACC |
| | AGAGCAATGGGCAGCCGGAGAACAACTACAAGACCACGC | GCTGTATATTACTGTGCTTCCC |
| | CTCCCGTGCTGGACTCCGACGGCTCCTTCGCCCTCGTGAGC | CACAAGTACACTATGATTACG |
| | AAGCTCACCGTGGACAAGTCTAGATGGCAGCAGGGGAAC | GGGGCTTCCCATACTGGGGCC |
| | GTCTTCTCATGCTCCGTGATGCATGAGGCTCTGCACAACCA | AGGGAACTCTCGTCACAGTAT |
| | CTACACGCAGAAGAGCCTCTCCCTGTCTCCGGGT | CATCCG |
| | (172) | (173) |
| CD3B2051- | GAAATTGTATTGACTCAGTCCCCAGCTACATTGAGCGCAA | GAAATTGTATTGACTCAGTCCC |
| N106A- | GTCCTGGCGAGAGAGTAACCCTGTCTTGTTCTGCCAGTAG | CAGCTACATTGAGCGCAAGTC |
| LH-scFv | TAGTGTAAGCTACATGAACTGGTATCAGCAGAAACCCGGA | CTGGCGAGAGAGTAACCCTGT |
| | CAGGCCCCACGCCGACTTATCTATGATTCAAGTAAGCTCGC | CTTGTTCTGCCAGTAGTAGTGT |
| | TAGTGGGGTTCCAGCCAGATTTAGTGGTTCTGGCTCTGGA | AAGCTACATGAACTGGTATCA |
| | CGCGATTACACTCTGACCATTTCTTCTCTGGAGCCTGAGGA | GCAGAAACCCGGACAGGCCCC |
| | CTTCGCAGTATATTACTGCCAACAATGGTCACGCAATCCAC | ACGCCGACTTATCTATGATTCA |
| | CAACATTCGGTGGAGGGACAAAAGTGGAAATCAAAGGCG | AGTAAGCTCGCTAGTGGGGTT |
| | GCTCCGAGGGCAAGAGCAGCGGCAGCGGCAGCGAGAGC | CCAGCCAGATTTAGTGGTTCT |
| | AAGAGCACCGGCGGCAGCCAAGTTCAGTTGGTTCAATCCG | GGCTCTGGACGCGATTACACT |
| | GCGCTGAGGTCAAAAAACCTGGATCATCTGTGAAAGTCTC | CTGACCATTTCTTCTCTGGAGC |
| | ATGTAAGGCATCTGGTTATACCTTCACTCGGAGTACCATGC | CTGAGGACTTCGCAGTATATT |
| | ATTGGGTTAAGCAGGCCCCCGGTCAGGGGTTGGAGTGGA | ACTGCCAACAATGGTCACGCA |
| | TGGGTTACATCAACCCTTCCTCAGCCTACACAAATTATAAT | ATCCACCAACATTCGGTGGAG |
| | CAGAAATTTCAGGGGCGCGTTACTCTCACCGCTGACAAGT | GGACAAAAGTGGAAATCAAA |
| | CCACCTCCACAGCCTATATGGAGCTGTCAAGCCTGCGGAG | GGCGGCTCCGAGGGCAAGAG |
| | TGAGGATACAGCCGTATATTACTGTGCCAGTCCTCAGGTTC | CAGCGGCAGCGGCAGCGAGA |
| | ATTATGATTACGCTGGCTTCCCATATTGGGGTCAGGGGAC | GCAAGAGCACCGGCGGCAGC |
| | TCTCGTCACTGTGTCCAGCGAGCCCAAATCTAGCGACAAA | CAAGTTCAGTTGGTTCAATCC |
| | ACTCACACATGTCCACCGTGCCCAGCACCTGAAGCAGCAG | GGCGCTGAGGTCAAAAAACCT |
| | GGGGACCGTCAGTCTTCCTCTTCCCCCCAAAACCCAAGGAC | GGATCATCTGTGAAAGTCTCA |
| | ACCCTCATGATCTCCCGGACCCCTGAGGTCACATGCGTGGT | TGTAAGGCATCTGGTTATACCT |
| | GGTGAGCGTGAGCCACGAAGACCCTGAGGTCAAGTTCAA | TCACTCGGAGTACCATGCATT |
| | CTGGTACGTGGACGGCGTGGAGGTGCATAATGCCAAGAC | GGGTTAAGCAGGCCCCCGGTC |
| | AAAGCCGCGGGAGGAGCAGTACAACAGCACGTACCGTGT | AGGGGTTGGAGTGGATGGGT |
| | GGTCAGCGTCCTCACCGTCCTGCACCAGGACTGGCTGAAT | TACATCAACCCTTCCTCAGCCT |
| | GGCAAGGAGTACAAGTGCAAGGTCTCCAACAAAGCCCTCC | ACACAAATTATAATCAGAAAT |
| | CAGCCCCCATCGAGAAAACCATCTCCAAAGCCAAAGGGCA | TTCAGGGGCGCGTTACTCTCA |
| | GCCCCGAGAACCACAGGTGTACGTGTACCCCCCATCCCGG | CCGCTGACAAGTCCACCTCCA |
| | GAGGAGATGACCAAGAACCAGGTCAGCCTGACCTGCCTG | CAGCCTATATGGAGCTGTCAA |
| | GTCAAAGGCTTCTATCCCAGCGACATCGCCGTGGAGTGGG | GCCTGCGGAGTGAGGATACA |
| | AGAGCAATGGGCAGCCGGAGAACAACTACAAGACCACGC | GCCGTATATTACTGTGCCAGTC |
| | CTCCCGTGCTGGACTCCGACGGCTCCTTCGCCCTCGTGAGC | CTCAGGTTCATTATGATTACGC |
| | AAGCTCACCGTGGACAAGTCTAGATGGCAGCAGGGGAAC | TGGCTTCCCATATTGGGGTCA |
| | GTCTTCTCATGCTCCGTGATGCATGAGGCTCTGCACAACCA | GGGGACTCTCGTCACTGTGTC |
| | CTACACGCAGAAGAGCCTCTCCCTGTCTCCGGGT | CAGCG |
| | (174) | (175) |
| CD3B2051- | GAGATAGTTCTTACACAGAGCCCTGCAACCTTGAGTGCAA | GAGATAGTTCTTACACAGAGC |
| LH-scFv | GTCCAGGGGAACGGGTGACTCTGAGTTGTAGTGCTTCTAG | CCTGCAACCTTGAGTGCAAGT |
| | TTCCGTAAGTTATATGAACTGGTACCAACAGAAGCCAGGT | CCAGGGGAACGGGTGACTCT |
| | CAAGCACCAAGACGCCTTATCTACGACTCATCTAAACTTGC | GAGTTGTAGTGCTTCTAGTTCC |
| | TAGTGGAGTGCCAGCCAGATTTTCCGGTTCAGGAAGTGGG | GTAAGTTATATGAACTGGTAC |
| | AGGGACTACACACTTACCATCTCATCCCTTGAGCCCGAAGA | CAACAGAAGCCAGGTCAAGCA |
| | TTTCGCCGTATATTACTGTCAACAATGGTCAAGAAATCCTC | CCAAGACGCCTTATCTACGACT |
| | CTACATTTGGTGGTGGTACAAAAGTAGAGATCAAGGGCG | CATCTAAACTTGCTAGTGGAG |
| | GCTCCGAGGGCAAGAGCAGCGGCAGCGGCAGCGAGAGC | TGCCAGCCAGATTTTCCGGTTC |
| | AAGAGCACCGGCGGCAGCCAAGTGCAGTTGGTGCAGAGT | AGGAAGTGGGAGGGACTACA |
| | GGGGCTGAGGTTAAAAAGCCTGGTTCCAGTGTGAAAGTC | CACTTACCATCTCATCCCTTGA |
| | AGTTGTAAAGCCTCCGGGTACACTTTTACTAGGTCAACAAT | GCCCGAAGATTTCGCCGTATA |
| | GCACTGGGTCAAGCAAGCCCCCGGCCAAGGCTTGGAATG | TTACTGTCAACAATGGTCAAG |
| | GATGGGGTACATAAATCCAAGCAGTGCCTACACCAACTAT | AAATCCTCCTACATTTGGTGGT |
| | AACCAAAAATTTCAAGGTAGAGTAACATTGACTGCTGACA | GGTACAAAAGTAGAGATCAA |
| | AGTCCACATCAACTGCTTATATGGAGCTGTCCTCTCTTCGG | GGGCGGCTCCGAGGGCAAGA |
| | TCTGAAGATACCGCCGTATACTATTGCGCCTCCCCCCAAGT | GCAGCGGCAGCGGCAGCGAG |
| | CCACTACGACTATAACGGATTTCCCTACTGGGGACAAGGA | AGCAAGAGCACCGGCGGCAG |
| | ACCCTGGTAACAGTTTCTTCAGAGCCCAAATCTAGCGACAA | CCAAGTGCAGTTGGTGCAGAG |
| | AACTCACACATGTCCACCGTGCCCAGCACCTGAAGCAGCA | TGGGGCTGAGGTTAAAAAGCC |
| | GGGGGACCGTCAGTCTTCCTCTTCCCCCCAAAACCCAAGG | TGGTTCCAGTGTGAAAGTCAG |
| | ACACCCTCATGATCTCCCGGACCCCTGAGGTCACATGCGTG | TTGTAAAGCCTCCGGGTACAC |
| | GTGGTGAGCGTGAGCCACGAAGACCCTGAGGTCAAGTTC | TTTTACTAGGTCAACAATGCAC |
| | AACTGGTACGTGGACGGCGTGGAGGTGCATAATGCCAAG | TGGGTCAAGCAAGCCCCCGGC |
| | ACAAAGCCGCGGGAGGAGCAGTACAACAGCACGTACCGT | CAAGGCTTGGAATGGATGGG |
| | GTGGTCAGCGTCCTCACCGTCCTGCACCAGGACTGGCTGA | GTACATAAATCCAAGCAGTGC |
| | ATGGCAAGGAGTACAAGTGCAAGGTCTCCAACAAAGCCCT | CTACACCAACTATAACCAAAA |
| | CCCAGCCCCCATCGAGAAAACCATCTCCAAAGCCAAAGGG | ATTTCAAGGTAGAGTAACATT |
| | CAGCCCCGAGAACCACAGGTGTACGTGTACCCCCCATCCC | GACTGCTGACAAGTCCACATC |
| | GGGAGGAGATGACCAAGAACCAGGTCAGCCTGACCTGCC | AACTGCTTATATGGAGCTGTC |
| | TGGTCAAAGGCTTCTATCCCAGCGACATCGCCGTGGAGTG | CTCTCTTCGGTCTGAAGATACC |
| | GGAGAGCAATGGGCAGCCGGAGAACAACTACAAGACCAC | GCCGTATACTATTGCGCCTCCC |
| | GCCTCCCGTGCTGGACTCCGACGGCTCCTTCGCCCTCGTGA | CCCAAGTCCACTACGACTATA |
| | GCAAGCTCACCGTGGACAAGTCTAGATGGCAGCAGGGGA | ACGGATTTCCCTACTGGGGAC |
| | ACGTCTTCTCATGCTCCGTGATGCATGAGGCTCTGCACAAC | AAGGAACCCTGGTAACAGTTT |
| | CACTACACGCAGAAGAGCCTCTCCCTGTCTCCGGGT | CTTCAG |
| | (176) | (177) |
| CD3B2030- | GAAATTGTCCTGACTCAGTCTCCAGCCACACTGAGTGCATC | GAAATTGTCCTGACTCAGTCTC |
| N106S- | TCCCGGCGAGCGGGTCACTCTTAGTTGCAGCGCCAGTTCT | CAGCCACACTGAGTGCATCTC |
| LH-scFv | AGTGTATCATATATGAACTGGTATCAGCAAAAGCCAGGTC | CCGGCGAGCGGGTCACTCTTA |
| | AAGCTCCCAGGCGATGGATATACGACTCATCAAAACTCGC | GTTGCAGCGCCAGTTCTAGTG |
| | CTCTGGCGTCCCAGCCCGGTTCTCCGGTTCCGGCTCTGGGC | TATCATATATGAACTGGTATCA |
| | GCGACTATACCCTTACAATTTCTAGCCTCGAACCAGAAGAT | GCAAAAGCCAGGTCAAGCTCC |
| | TTTGCTGTATATTATTGTCAACAGTGGTCACGTAACCCACC | CAGGCGATGGATATACGACTC |
| | AACCTTCGGTGGAGGGACAAAGGTCGAGATAAAAGGCGG | ATCAAAACTCGCCTCTGGCGT |
| | CTCCGAGGGCAAGAGCAGCGGCAGCGGCAGCGAGAGCA | CCCAGCCCGGTTCTCCGGTTCC |
| | AGAGCACCGGCGGCAGCCAAGTACAGCTCGTTCAGTCCG | GGCTCTGGGCGCGACTATACC |
| | GTGCAGAAGTCAAGAAACCAGGAAGTAGCGTAAAAGTGT | CTTACAATTTCTAGCCTCGAAC |
| | CATGTAAAGCAAGTGGTTATACCTTTACACGCTCAACTATG | CAGAAGATTTTGCTGTATATTA |
| | CATTGGGTTAAGCAGGCTCCAGGACAAGGGCTTGAGTGG | TTGTCAACAGTGGTCACGTAA |
| | ATAGGATACATCAATCCATCTAGCGCCTACACAAATTATAA | CCCACCAACCTTCGGTGGAGG |
| | CCAGAAGTTCCAGGGGAGAGTTACCCTCACTGCCGATAAG | GACAAAGGTCGAGATAAAAG |
| | TCCACATCAACCGCCTATATGGAATTGAGTTCCCTTCGTAG | GCGGCTCCGAGGGCAAGAGC |
| | TGAGGACACTGCCGTCTACTACTGTGCCTCCCCTCAGGTTC | AGCGGCAGCGGCAGCGAGAG |
| | ATTATGATTACTCAGGTTTTCCATACTGGGGCCAGGGCACC | CAAGAGCACCGGCGGCAGCC |
| | CTCGTAACAGTAAGCAGCGAGCCCAAATCTAGCGACAAAA | AAGTACAGCTCGTTCAGTCCG |
| | CTCACACATGTCCACCGTGCCCAGCACCTGAAGCAGCAGG | GTGCAGAAGTCAAGAAACCA |
| | GGGACCGTCAGTCTTCCTCTTCCCCCCAAAACCCAAGGACA | GGAAGTAGCGTAAAAGTGTCA |
| | CCCTCATGATCTCCCGGACCCCTGAGGTCACATGCGTGGT | TGTAAAGCAAGTGGTTATACC |
| | GGTGAGCGTGAGCCACGAAGACCCTGAGGTCAAGTTCAA | TTTACACGCTCAACTATGCATT |
| | CTGGTACGTGGACGGCGTGGAGGTGCATAATGCCAAGAC | GGGTTAAGCAGGCTCCAGGAC |
| | AAAGCCGCGGGAGGAGCAGTACAACAGCACGTACCGTGT | AAGGGCTTGAGTGGATAGGA |
| | GGTCAGCGTCCTCACCGTCCTGCACCAGGACTGGCTGAAT | TACATCAATCCATCTAGCGCCT |
| | GGCAAGGAGTACAAGTGCAAGGTCTCCAACAAAGCCCTCC | ACACAAATTATAACCAGAAGT |
| | CAGCCCCCATCGAGAAAACCATCTCCAAAGCCAAAGGGCA | TCCAGGGGAGAGTTACCCTCA |
| | GCCCCGAGAACCACAGGTGTACGTGTACCCCCCATCCCGG | CTGCCGATAAGTCCACATCAA |
| | GAGGAGATGACCAAGAACCAGGTCAGCCTGACCTGCCTG | CCGCCTATATGGAATTGAGTT |
| | GTCAAAGGCTTCTATCCCAGCGACATCGCCGTGGAGTGGG | CCCTTCGTAGTGAGGACACTG |
| | AGAGCAATGGGCAGCCGGAGAACAACTACAAGACCACGC | CCGTCTACTACTGTGCCTCCCC |
| | CTCCCGTGCTGGACTCCGACGGCTCCTTCGCCCTCGTGAGC | TCAGGTTCATTATGATTACTCA |
| | AAGCTCACCGTGGACAAGTCTAGATGGCAGCAGGGGAAC | GGTTTTCCATACTGGGGCCAG |
| | GTCTTCTCATGCTCCGTGATGCATGAGGCTCTGCACAACCA | GGCACCCTCGTAACAGTAAGC |
| | CTACACGCAGAAGAGCCTCTCCCTGTCTCCGGGT | AGCG |
| | (178) | (179) |
| CD3B2030- | GAAATTGTACTCACACAAAGTCCTGCAACTTTGTCTGCCTC | GAAATTGTACTCACACAAAGT |
| N106G- | ACCAGGGGAAAGAGTAACTCTTAGTTGTAGTGCTAGTTCA | CCTGCAACTTTGTCTGCCTCAC |
| LH-scFv | TCCGTTTCTTATATGAATTGGTATCAGCAGAAACCCGGACA | CAGGGGAAAGAGTAACTCTTA |
| | AGCACCCCGGCGGTGGATATACGATTCCAGTAAACTTGCA | GTTGTAGTGCTAGTTCATCCGT |
| | AGCGGAGTCCCCGCACGTTTCAGCGGCAGTGGCTCAGGCC | TTCTTATATGAATTGGTATCAG |
| | GGGACTATACCCTGACTATTTCCTCCTTGGAACCTGAGGAT | CAGAAACCCGGACAAGCACCC |
| | TTTGCTGTGTACTACTGTCAGCAATGGAGTAGAAATCCTCC | CGGCGGTGGATATACGATTCC |
| | CACCTTTGGAGGTGGCACTAAAGTAGAGATCAAAGGCGG | AGTAAACTTGCAAGCGGAGTC |
| | CTCCGAGGGCAAGAGCAGCGGCAGCGGCAGCGAGAGCA | CCCGCACGTTTCAGCGGCAGT |
| | AGAGCACCGGCGGCAGCCAGGTGCAACTGGTACAAAGTG | GGCTCAGGCCGGGACTATACC |
| | GTGCCGAGGTGAAGAAGCCAGGGTCCAGTGTGAAAGTAT | CTGACTATTTCCTCCTTGGAAC |
| | CATGTAAAGCCAGCGGGTACACATTCACTAGGAGCACTAT | CTGAGGATTTTGCTGTGTACTA |
| | GCACTGGGTAAAGCAAGCCCCAGGGCAAGGTTTGGAGTG | CTGTCAGCAATGGAGTAGAAA |
| | GATCGGTTATATTAACCCTTCATCTGCTTATACAAATTACAA | TCCTCCCACCTTTGGAGGTGG |
| | TCAGAAATTCCAAGGGAGGGTCACTTTGACCGCTGACAAG | CACTAAAGTAGAGATCAAAGG |
| | TCTACCTCTACTGCATACATGGAACTCTCCAGCCTTCGTTCA | CGGCTCCGAGGGCAAGAGCA |
| | GAAGACACAGCCGTTTATTACTGTGCCTCCCCACAGGTACA | GCGGCAGCGGCAGCGAGAGC |
| | CTACGACTACGGTGGATTCCCATATTGGGGTCAAGGCACC | AAGAGCACCGGCGGCAGCCA |
| | CTTGTAACAGTATCAAGCGAGCCCAAATCTAGCGACAAAA | GGTGCAACTGGTACAAAGTGG |
| | CTCACACATGTCCACCGTGCCCAGCACCTGAAGCAGCAGG | TGCCGAGGTGAAGAAGCCAG |
| | GGGACCGTCAGTCTTCCTCTTCCCCCCAAAACCCAAGGACA | GGTCCAGTGTGAAAGTATCAT |
| | CCCTCATGATCTCCCGGACCCCTGAGGTCACATGCGTGGT | GTAAAGCCAGCGGGTACACAT |
| | GGTGAGCGTGAGCCACGAAGACCCTGAGGTCAAGTTCAA | TCACTAGGAGCACTATGCACT |
| | CTGGTACGTGGACGGCGTGGAGGTGCATAATGCCAAGAC | GGGTAAAGCAAGCCCCAGGG |
| | AAAGCCGCGGGAGGAGCAGTACAACAGCACGTACCGTGT | CAAGGTTTGGAGTGGATCGGT |
| | GGTCAGCGTCCTCACCGTCCTGCACCAGGACTGGCTGAAT | TATATTAACCCTTCATCTGCTT |
| | GGCAAGGAGTACAAGTGCAAGGTCTCCAACAAAGCCCTCC | ATACAAATTACAATCAGAAAT |
| | CAGCCCCCATCGAGAAAACCATCTCCAAAGCCAAAGGGCA | TCCAAGGGAGGGTCACTTTGA |
| | GCCCCGAGAACCACAGGTGTACGTGTACCCCCCATCCCGG | CCGCTGACAAGTCTACCTCTAC |
| | GAGGAGATGACCAAGAACCAGGTCAGCCTGACCTGCCTG | TGCATACATGGAACTCTCCAG |
| | GTCAAAGGCTTCTATCCCAGCGACATCGCCGTGGAGTGGG | CCTTCGTTCAGAAGACACAGC |
| | AGAGCAATGGGCAGCCGGAGAACAACTACAAGACCACGC | CGTTTATTACTGTGCCTCCCCA |
| | CTCCCGTGCTGGACTCCGACGGCTCCTTCGCCCTCGTGAGC | CAGGTACACTACGACTACGGT |
| | AAGCTCACCGTGGACAAGTCTAGATGGCAGCAGGGGAAC | GGATTCCCATATTGGGGTCAA |
| | GTCTTCTCATGCTCCGTGATGCATGAGGCTCTGCACAACCA | GGCACCCTTGTAACAGTATCA |
| | CTACACGCAGAAGAGCCTCTCCCTGTCTCCGGGT | AGCG |
| | (180) | (181) |
| CD3B2030- | GAAATTGTTTTGACCCAATCACCTGCCACTCTCTCTGCCTCT | GAAATTGTTTTGACCCAATCAC |
| N106A- | CCTGGTGAGCGAGTTACTTTGTCATGTAGCGCATCATCAA | CTGCCACTCTCTCTGCCTCTCC |
| LH-scFv | GTGTATCTTACATGAACTGGTACCAACAAAAACCCGGACA | TGGTGAGCGAGTTACTTTGTC |
| | GGCACCACGTCGTTGGATTTATGACAGTAGCAAGCTCGCC | ATGTAGCGCATCATCAAGTGT |
| | TCCGGGGTACCCGCAAGATTTTCCGGGTCAGGGTCTGGCA | ATCTTACATGAACTGGTACCA |
| | GGGACTATACCCTGACAATCAGCAGTCTGGAACCTGAGGA | ACAAAAACCCGGACAGGCACC |
| | CTTTGCTGTGTATTACTGCCAACAGTGGTCTCGCAACCCCC | ACGTCGTTGGATTTATGACAG |
| | CTACTTTCGGGGGAGGTACAAAGGTAGAAATTAAGGGCG | TAGCAAGCTCGCCTCCGGGGT |
| | GCTCCGAGGGCAAGAGCAGCGGCAGCGGCAGCGAGAGC | ACCCGCAAGATTTTCCGGGTC |
| | AAGAGCACCGGCGGCAGCCAAGTGCAACTCGTGCAAAGC | AGGGTCTGGCAGGGACTATAC |
| | GGGGCTGAAGTGAAGAAGCCTGGATCAAGCGTGAAGGTC | CCTGACAATCAGCAGTCTGGA |
| | AGTTGCAAAGCCTCTGGATATACCTTCACTCGATCAACCAT | ACCTGAGGACTTTGCTGTGTA |
| | GCACTGGGTCAAGCAGGCCCCAGGGCAAGGGCTCGAATG | TTACTGCCAACAGTGGTCTCG |
| | GATAGGATATATTAACCCAAGTTCTGCCTACACTAACTATA | CAACCCCCCTACTTTCGGGGG |
| | ATCAGAAGTTTCAAGGCCGGGTAACACTTACAGCCGATAA | AGGTACAAAGGTAGAAATTAA |
| | GAGTACCTCAACAGCATACATGGAACTTAGTTCTTTGCGG | GGGCGGCTCCGAGGGCAAGA |
| | AGCGAGGATACCGCTGTGTATTACTGCGCTTCACCTCAGG | GCAGCGGCAGCGGCAGCGAG |
| | TTCACTACGACTACGCTGGATTTCCCTATTGGGGTCAGGGT | AGCAAGAGCACCGGCGGCAG |
| | ACACTGGTTACAGTTTCCTCTGAGCCCAAATCTAGCGACAA | CCAAGTGCAACTCGTGCAAAG |
| | AACTCACACATGTCCACCGTGCCCAGCACCTGAAGCAGCA | CGGGGCTGAAGTGAAGAAGC |
| | GGGGGACCGTCAGTCTTCCTCTTCCCCCCAAAACCCAAGG | CTGGATCAAGCGTGAAGGTCA |
| | ACACCCTCATGATCTCCCGGACCCCTGAGGTCACATGCGTG | GTTGCAAAGCCTCTGGATATA |
| | GTGGTGAGCGTGAGCCACGAAGACCCTGAGGTCAAGTTC | CCTTCACTCGATCAACCATGCA |
| | AACTGGTACGTGGACGGCGTGGAGGTGCATAATGCCAAG | CTGGGTCAAGCAGGCCCCAGG |
| | ACAAAGCCGCGGGAGGAGCAGTACAACAGCACGTACCGT | GCAAGGGCTCGAATGGATAG |
| | GTGGTCAGCGTCCTCACCGTCCTGCACCAGGACTGGCTGA | GATATATTAACCCAAGTTCTGC |
| | ATGGCAAGGAGTACAAGTGCAAGGTCTCCAACAAAGCCCT | CTACACTAACTATAATCAGAA |
| | CCCAGCCCCCATCGAGAAAACCATCTCCAAAGCCAAAGGG | GTTTCAAGGCCGGGTAACACT |
| | CAGCCCCGAGAACCACAGGTGTACGTGTACCCCCCATCCC | TACAGCCGATAAGAGTACCTC |
| | GGGAGGAGATGACCAAGAACCAGGTCAGCCTGACCTGCC | AACAGCATACATGGAACTTAG |
| | TGGTCAAAGGCTTCTATCCCAGCGACATCGCCGTGGAGTG | TTCTTTGCGGAGCGAGGATAC |
| | GGAGAGCAATGGGCAGCCGGAGAACAACTACAAGACCAC | CGCTGTGTATTACTGCGCTTCA |
| | GCCTCCCGTGCTGGACTCCGACGGCTCCTTCGCCCTCGTGA | CCTCAGGTTCACTACGACTAC |
| | GCAAGCTCACCGTGGACAAGTCTAGATGGCAGCAGGGGA | GCTGGATTTCCCTATTGGGGT |
| | ACGTCTTCTCATGCTCCGTGATGCATGAGGCTCTGCACAAC | CAGGGTACACTGGTTACAGTT |
| | CACTACACGCAGAAGAGCCTCTCCCTGTCTCCGGGT | TCCTCTG |
| | (182) | (183) |
| CD3B2030- | GAAATTGTCTTGACCCAGTCTCCAGCAACTCTTAGTGCATC | GAAATTGTCTTGACCCAGTCTC |
| LH-scFv | ACCAGGTGAGCGTGTTACCCTCTCATGTAGCGCCAGCTCAT | CAGCAACTCTTAGTGCATCACC |
| | CTGTTAGTTATATGAATTGGTATCAACAGAAACCAGGGCA | AGGTGAGCGTGTTACCCTCTC |
| | AGCTCCCAGAAGATGGATATATGATTCTTCAAAACTCGCA | ATGTAGCGCCAGCTCATCTGTT |
| | AGTGGTGTCCCAGCCCGCTTCTCAGGCTCTGGTTCCGGTC | AGTTATATGAATTGGTATCAA |
| | GCGATTATACTCTCACCATCAGTAGTTTGGAACCCGAAGAT | CAGAAACCAGGGCAAGCTCCC |
| | TTCGCCGTCTATTATTGCCAGCAATGGAGCAGGAATCCCCC | AGAAGATGGATATATGATTCT |
| | CACATTCGGCGGCGGTACAAAGGTTGAGATTAAGGGCGG | TCAAAACTCGCAAGTGGTGTC |
| | CTCCGAGGGCAAGAGCAGCGGCAGCGGCAGCGAGAGCA | CCAGCCCGCTTCTCAGGCTCTG |
| | AGAGCACCGGCGGCAGCCAAGTTCAGTTGGTTCAATCCGG | GTTCCGGTCGCGATTATACTCT |
| | CGCAGAGGTTAAAAAACCCGGATCAAGCGTTAAGGTTAGT | CACCATCAGTAGTTTGGAACC |
| | TGTAAAGCCTCTGGCTACACTTTCACACGCTCAACAATGCA | CGAAGATTTCGCCGTCTATTAT |
| | TTGGGTTAAGCAGGCCCCTGGGCAGGGACTGGAGTGGAT | TGCCAGCAATGGAGCAGGAAT |
| | CGGTTACATAAACCCATCCAGCGCCTATACAAACTATAACC | CCCCCCACATTCGGCGGCGGT |
| | AGAAGTTCCAAGGGCGGGTTACATTGACCGCTGACAAGTC | ACAAAGGTTGAGATTAAGGGC |
| | CACTAGCACAGCATATATGGAGCTGTCAAGTCTGAGATCC | GGCTCCGAGGGCAAGAGCAG |
| | GAAGACACTGCCGTATATTATTGCGCTAGTCCACAAGTGC | CGGCAGCGGCAGCGAGAGCA |
| | ACTATGACTATAACGGTTTTCCCTATTGGGGACAAGGAAC | AGAGCACCGGCGGCAGCCAA |
| | CCTGGTGACCGTTAGCTCCGAGCCCAAATCTAGCGACAAA | GTTCAGTTGGTTCAATCCGGC |
| | ACTCACACATGTCCACCGTGCCCAGCACCTGAAGCAGCAG | GCAGAGGTTAAAAAACCCGG |
| | GGGGACCGTCAGTCTTCCTCTTCCCCCCAAAACCCAAGGAC | ATCAAGCGTTAAGGTTAGTTG |
| | ACCCTCATGATCTCCCGGACCCCTGAGGTCACATGCGTGGT | TAAAGCCTCTGGCTACACTTTC |
| | GGTGAGCGTGAGCCACGAAGACCCTGAGGTCAAGTTCAA | ACACGCTCAACAATGCATTGG |
| | CTGGTACGTGGACGGCGTGGAGGTGCATAATGCCAAGAC | GTTAAGCAGGCCCCTGGGCAG |
| | AAAGCCGCGGGAGGAGCAGTACAACAGCACGTACCGTGT | GGACTGGAGTGGATCGGTTAC |
| | GGTCAGCGTCCTCACCGTCCTGCACCAGGACTGGCTGAAT | ATAAACCCATCCAGCGCCTAT |
| | GGCAAGGAGTACAAGTGCAAGGTCTCCAACAAAGCCCTCC | ACAAACTATAACCAGAAGTTC |
| | CAGCCCCCATCGAGAAAACCATCTCCAAAGCCAAAGGGCA | CAAGGGCGGGTTACATTGACC |
| | GCCCCGAGAACCACAGGTGTACGTGTACCCCCCATCCCGG | GCTGACAAGTCCACTAGCACA |
| | GAGGAGATGACCAAGAACCAGGTCAGCCTGACCTGCCTG | GCATATATGGAGCTGTCAAGT |
| | GTCAAAGGCTTCTATCCCAGCGACATCGCCGTGGAGTGGG | CTGAGATCCGAAGACACTGCC |
| | AGAGCAATGGGCAGCCGGAGAACAACTACAAGACCACGC | GTATATTATTGCGCTAGTCCAC |
| | CTCCCGTGCTGGACTCCGACGGCTCCTTCGCCCTCGTGAGC | AAGTGCACTATGACTATAACG |
| | AAGCTCACCGTGGACAAGTCTAGATGGCAGCAGGGGAAC | GTTTTCCCTATTGGGGACAAG |
| | GTCTTCTCATGCTCCGTGATGCATGAGGCTCTGCACAACCA | GAACCCTGGTGACCGTTAGCT |
| | CTACACGCAGAAGAGCCTCTCCCTGTCTCCGGGT | CCG |
| | (184) | (185) |
| CD3B2089- | CAAGTGCAGTTGGTCCAGTCAGGCGCAGAAGTGAAGAAG | CAAGTGCAGTTGGTCCAGTCA |
| N106S- | CCCGGCTCAAGCGTCAAGGTATCATGTAAGGCTTCTGGAT | GGCGCAGAAGTGAAGAAGCC |
| HL-scFv | ATACTTTCACCCGAAGCACAATGCACTGGGTTCGCCAGGC | CGGCTCAAGCGTCAAGGTATC |
| | CCCTGGACAGGGTCTTGAGTGGATGGGGTATATCAACCCA | ATGTAAGGCTTCTGGATATAC |
| | TCCTCAGCATATACTAACTATGCTCAGAAGTTTCAGGGGCG | TTTCACCCGAAGCACAATGCA |
| | TGTCACTTTGACCGCCGATAAGTCCACAAGCACCGCTTATA | CTGGGTTCGCCAGGCCCCTGG |
| | TGGAACTGTCTTCATTGCGCTCTGAAGACACTGCAGTGTAC | ACAGGGTCTTGAGTGGATGG |
| | TATTGCGCCAGCCCACAGGTCCACTACGACTATTCTGGATT | GGTATATCAACCCATCCTCAGC |
| | TCCATACTGGGGGCAGGGGACCTTGGTGACTGTAAGCTCT | ATATACTAACTATGCTCAGAA |
| | GGCGGCTCCGAGGGCAAGAGCAGCGGCAGCGGCAGCGA | GTTTCAGGGGCGTGTCACTTT |
| | GAGCAAGAGCACCGGCGGCAGCGAGATTGTACTGACACA | GACCGCCGATAAGTCCACAAG |
| | GTCCCCAGCAACCTTGTCCGCTTCTCCCGGCGAAAGGGTC | CACCGCTTATATGGAACTGTCT |
| | ACTCTCTCCTGCTCCGCTAGTTCTTCAGTGTCATATATGAAT | TCATTGCGCTCTGAAGACACT |
| | TGGTACCAACAAAAGCCAGGTCAGGCTCCAAGAAGATGG | GCAGTGTACTATTGCGCCAGC |
| | ATTTACGATTCCTCCAAGTTGGCTTCTGGTGTCCCTGCACG | CCACAGGTCCACTACGACTATT |
| | ATTTAGCGGGTCAGGGTCAGGGCGCGATTACACACTCACA | CTGGATTTCCATACTGGGGGC |
| | ATTAGTAGTCTCGAACCCGAGGACTTTGCCGTATATTACTG | AGGGGACCTTGGTGACTGTAA |
| | TCAGCAATGGAGTCGGAATCCCCCAACTTTCGGCGGGGGA | GCTCTGGCGGCTCCGAGGGCA |
| | ACAAAAGTAGAAATAAAAGAGCCCAAATCTAGCGACAAA | AGAGCAGCGGCAGCGGCAGC |
| | ACTCACACATGTCCACCGTGCCCAGCACCTGAAGCAGCAG | GAGAGCAAGAGCACCGGCGG |
| | GGGGACCGTCAGTCTTCCTCTTCCCCCCAAAACCCAAGGAC | CAGCGAGATTGTACTGACACA |
| | ACCCTCATGATCTCCCGGACCCCTGAGGTCACATGCGTGGT | GTCCCCAGCAACCTTGTCCGCT |
| | GGTGAGCGTGAGCCACGAAGACCCTGAGGTCAAGTTCAA | TCTCCCGGCGAAAGGGTCACT |
| | CTGGTACGTGGACGGCGTGGAGGTGCATAATGCCAAGAC | CTCTCCTGCTCCGCTAGTTCTT |
| | AAAGCCGCGGGAGGAGCAGTACAACAGCACGTACCGTGT | CAGTGTCATATATGAATTGGT |
| | GGTCAGCGTCCTCACCGTCCTGCACCAGGACTGGCTGAAT | ACCAACAAAAGCCAGGTCAGG |
| | GGCAAGGAGTACAAGTGCAAGGTCTCCAACAAAGCCCTCC | CTCCAAGAAGATGGATTTACG |
| | CAGCCCCCATCGAGAAAACCATCTCCAAAGCCAAAGGGCA | ATTCCTCCAAGTTGGCTTCTGG |
| | GCCCCGAGAACCACAGGTGTACGTGTACCCCCCATCCCGG | TGTCCCTGCACGATTTAGCGG |
| | GAGGAGATGACCAAGAACCAGGTCAGCCTGACCTGCCTG | GTCAGGGTCAGGGCGCGATTA |
| | GTCAAAGGCTTCTATCCCAGCGACATCGCCGTGGAGTGGG | CACACTCACAATTAGTAGTCTC |
| | AGAGCAATGGGCAGCCGGAGAACAACTACAAGACCACGC | GAACCCGAGGACTTTGCCGTA |
| | CTCCCGTGCTGGACTCCGACGGCTCCTTCGCCCTCGTGAGC | TATTACTGTCAGCAATGGAGT |
| | AAGCTCACCGTGGACAAGTCTAGATGGCAGCAGGGGAAC | CGGAATCCCCCAACTTTCGGC |
| | GTCTTCTCATGCTCCGTGATGCATGAGGCTCTGCACAACCA | GGGGGAACAAAAGTAGAAAT |
| | CTACACGCAGAAGAGCCTCTCCCTGTCTCCGGGT | AAAAG |
| | (186) | (187) |
| CD3B2089- | CAAGTGCAGTTGGTTCAATCCGGCGCTGAAGTGAAGAAAC | CAAGTGCAGTTGGTTCAATCC |
| N106Q- | CTGGGTCATCTGTCAAAGTATCCTGTAAAGCCTCTGGGTAC | GGCGCTGAAGTGAAGAAACCT |
| HL-scFv | ACTTTTACACGTAGCACCATGCACTGGGTCCGTCAAGCCCC | GGGTCATCTGTCAAAGTATCC |
| | TGGGCAAGGCCTTGAGTGGATGGGTTATATAAACCCATCC | TGTAAAGCCTCTGGGTACACT |
| | TCCGCATACACAAATTACGCTCAAAAATTTCAAGGGCGAG | TTTACACGTAGCACCATGCACT |
| | TCACTCTCACTGCCGATAAATCCACTTCAACTGCCTATATG | GGGTCCGTCAAGCCCCTGGGC |
| | GAGCTTAGTTCATTGCGATCAGAAGATACTGCAGTCTATTA | AAGGCCTTGAGTGGATGGGTT |
| | TTGTGCATCACCTCAGGTCCATTACGACTACCAAGGGTTCC | ATATAAACCCATCCTCCGCATA |
| | CCTACTGGGGACAGGGGACTTTGGTAACTGTGTCTTCTGG | CACAAATTACGCTCAAAAATTT |
| | CGGCTCCGAGGGCAAGAGCAGCGGCAGCGGCAGCGAGA | CAAGGGCGAGTCACTCTCACT |
| | GCAAGAGCACCGGCGGCAGCGAGATCGTACTGACCCAAA | GCCGATAAATCCACTTCAACT |
| | GTCCCGCCACTCTCTCTGCTAGCCCAGGCGAGAGAGTTAC | GCCTATATGGAGCTTAGTTCAT |
| | CTTGTCTTGCTCTGCTAGTTCAAGTGTCAGTTATATGAACT | TGCGATCAGAAGATACTGCAG |
| | GGTATCAGCAGAAGCCAGGACAGGCACCTCGAAGATGGA | TCTATTATTGTGCATCACCTCA |
| | TATATGACTCCTCCAAACTCGCATCAGGCGTACCAGCACGC | GGTCCATTACGACTACCAAGG |
| | TTTTCTGGGAGCGGTAGTGGTAGGGATTATACACTCACCA | GTTCCCCTACTGGGGACAGGG |
| | TCTCTAGTTTGGAACCAGAAGATTTCGCTGTGTACTATTGC | GACTTTGGTAACTGTGTCTTCT |
| | CAGCAGTGGAGCCGCAACCCTCCTACCTTCGGCGGTGGGA | GGCGGCTCCGAGGGCAAGAG |
| | CAAAGGTAGAAATAAAAGAGCCCAAATCTAGCGACAAAA | CAGCGGCAGCGGCAGCGAGA |
| | CTCACACATGTCCACCGTGCCCAGCACCTGAAGCAGCAGG | GCAAGAGCACCGGCGGCAGC |
| | GGGACCGTCAGTCTTCCTCTTCCCCCCAAAACCCAAGGACA | GAGATCGTACTGACCCAAAGT |
| | CCCTCATGATCTCCCGGACCCCTGAGGTCACATGCGTGGT | CCCGCCACTCTCTCTGCTAGCC |
| | GGTGAGCGTGAGCCACGAAGACCCTGAGGTCAAGTTCAA | CAGGCGAGAGAGTTACCTTGT |
| | CTGGTACGTGGACGGCGTGGAGGTGCATAATGCCAAGAC | CTTGCTCTGCTAGTTCAAGTGT |
| | AAAGCCGCGGGAGGAGCAGTACAACAGCACGTACCGTGT | CAGTTATATGAACTGGTATCA |
| | GGTCAGCGTCCTCACCGTCCTGCACCAGGACTGGCTGAAT | GCAGAAGCCAGGACAGGCAC |
| | GGCAAGGAGTACAAGTGCAAGGTCTCCAACAAAGCCCTCC | CTCGAAGATGGATATATGACT |
| | CAGCCCCCATCGAGAAAACCATCTCCAAAGCCAAAGGGCA | CCTCCAAACTCGCATCAGGCG |
| | GCCCCGAGAACCACAGGTGTACGTGTACCCCCCATCCCGG | TACCAGCACGCTTTTCTGGGA |
| | GAGGAGATGACCAAGAACCAGGTCAGCCTGACCTGCCTG | GCGGTAGTGGTAGGGATTATA |
| | GTCAAAGGCTTCTATCCCAGCGACATCGCCGTGGAGTGGG | CACTCACCATCTCTAGTTTGGA |
| | AGAGCAATGGGCAGCCGGAGAACAACTACAAGACCACGC | ACCAGAAGATTTCGCTGTGTA |
| | CTCCCGTGCTGGACTCCGACGGCTCCTTCGCCCTCGTGAGC | CTATTGCCAGCAGTGGAGCCG |
| | AAGCTCACCGTGGACAAGTCTAGATGGCAGCAGGGGAAC | CAACCCTCCTACCTTCGGCGGT |
| | GTCTTCTCATGCTCCGTGATGCATGAGGCTCTGCACAACCA | GGGACAAAGGTAGAAATAAA |
| | CTACACGCAGAAGAGCCTCTCCCTGTCTCCGGGT | AG |
| | (188) | (189) |
| CD3B2089- | CAAGTTCAGCTTGTGCAGAGCGGGGCAGAGGTGAAGAAA | CAAGTTCAGCTTGTGCAGAGC |
| N106G- | CCCGGATCAAGCGTCAAAGTTTCTTGTAAAGCTAGTGGAT | GGGGCAGAGGTGAAGAAACC |
| HL-scFv | ATACTTTCACACGCTCAACTATGCACTGGGTGAGACAAGCT | CGGATCAAGCGTCAAAGTTTC |
| | CCTGGTCAGGGCCTGGAGTGGATGGGGTACATAAATCCCT | TTGTAAAGCTAGTGGATATAC |
| | CCAGTGCATATACTAACTATGCTCAAAAGTTCCAAGGCCGC | TTTCACACGCTCAACTATGCAC |
| | GTAACTCTCACTGCCGATAAGTCCACCAGCACTGCCTACAT | TGGGTGAGACAAGCTCCTGGT |
| | GGAACTGTCTAGTTTGCGATCCGAGGACACCGCCGTGTAC | CAGGGCCTGGAGTGGATGGG |
| | TACTGTGCTTCACCTCAAGTACATTATGACTACGGGGGATT | GTACATAAATCCCTCCAGTGC |
| | TCCCTACTGGGGCCAAGGTACTTTGGTCACAGTCTCAAGC | ATATACTAACTATGCTCAAAA |
| | GGCGGCTCCGAGGGCAAGAGCAGCGGCAGCGGCAGCGA | GTTCCAAGGCCGCGTAACTCT |
| | GAGCAAGAGCACCGGCGGCAGCGAGATCGTATTGACACA | CACTGCCGATAAGTCCACCAG |
| | ATCACCCGCCACATTGTCAGCTAGCCCCGGTGAGCGCGTC | CACTGCCTACATGGAACTGTCT |
| | ACACTTTCTTGTAGTGCATCAAGTAGCGTTTCTTACATGAA | AGTTTGCGATCCGAGGACACC |
| | TTGGTATCAGCAGAAACCAGGACAAGCACCACGGCGATG | GCCGTGTACTACTGTGCTTCAC |
| | GATATACGATTCTAGCAAACTCGCCAGTGGCGTCCCCGCTC | CTCAAGTACATTATGACTACG |
| | GATTCTCCGGGTCTGGCAGTGGTAGAGATTATACACTCAC | GGGGATTTCCCTACTGGGGCC |
| | TATCAGTTCTCTGGAACCAGAAGACTTCGCAGTCTATTACT | AAGGTACTTTGGTCACAGTCT |
| | GTCAACAATGGTCACGGAATCCCCCCACATTCGGTGGTGG | CAAGCGGCGGCTCCGAGGGC |
| | CACCAAGGTTGAAATTAAGGAGCCCAAATCTAGCGACAAA | AAGAGCAGCGGCAGCGGCAG |
| | ACTCACACATGTCCACCGTGCCCAGCACCTGAAGCAGCAG | CGAGAGCAAGAGCACCGGCG |
| | GGGGACCGTCAGTCTTCCTCTTCCCCCCAAAACCCAAGGAC | GCAGCGAGATCGTATTGACAC |
| | ACCCTCATGATCTCCCGGACCCCTGAGGTCACATGCGTGGT | AATCACCCGCCACATTGTCAG |
| | GGTGAGCGTGAGCCACGAAGACCCTGAGGTCAAGTTCAA | CTAGCCCCGGTGAGCGCGTCA |
| | CTGGTACGTGGACGGCGTGGAGGTGCATAATGCCAAGAC | CACTTTCTTGTAGTGCATCAAG |
| | AAAGCCGCGGGAGGAGCAGTACAACAGCACGTACCGTGT | TAGCGTTTCTTACATGAATTGG |
| | GGTCAGCGTCCTCACCGTCCTGCACCAGGACTGGCTGAAT | TATCAGCAGAAACCAGGACAA |
| | GGCAAGGAGTACAAGTGCAAGGTCTCCAACAAAGCCCTCC | GCACCACGGCGATGGATATAC |
| | CAGCCCCCATCGAGAAAACCATCTCCAAAGCCAAAGGGCA | GATTCTAGCAAACTCGCCAGT |
| | GCCCCGAGAACCACAGGTGTACGTGTACCCCCCATCCCGG | GGCGTCCCCGCTCGATTCTCC |
| | GAGGAGATGACCAAGAACCAGGTCAGCCTGACCTGCCTG | GGGTCTGGCAGTGGTAGAGA |
| | GTCAAAGGCTTCTATCCCAGCGACATCGCCGTGGAGTGGG | TTATACACTCACTATCAGTTCT |
| | AGAGCAATGGGCAGCCGGAGAACAACTACAAGACCACGC | CTGGAACCAGAAGACTTCGCA |
| | CTCCCGTGCTGGACTCCGACGGCTCCTTCGCCCTCGTGAGC | GTCTATTACTGTCAACAATGGT |
| | AAGCTCACCGTGGACAAGTCTAGATGGCAGCAGGGGAAC | CACGGAATCCCCCCACATTCG |
| | GTCTTCTCATGCTCCGTGATGCATGAGGCTCTGCACAACCA | GTGGTGGCACCAAGGTTGAAA |
| | CTACACGCAGAAGAGCCTCTCCCTGTCTCCGGGT | TTAAGG |
| | (190) | (191) |
| CD3B2089- | CAAGTGCAATTGGTCCAAAGTGGAGCTGAAGTAAAAAAA | CAAGTGCAATTGGTCCAAAGT |
| N106A- | CCCGGCTCCTCTGTGAAGGTCAGTTGCAAAGCCTCAGGGT | GGAGCTGAAGTAAAAAAACCC |
| HL-scFv | ACACCTTTACTAGGTCAACAATGCACTGGGTGCGACAAGC | GGCTCCTCTGTGAAGGTCAGT |
| | TCCCGGTCAGGGTTTGGAGTGGATGGGATACATAAACCCC | TGCAAAGCCTCAGGGTACACC |
| | TCATCAGCCTACACAAATTATGCACAAAAATTTCAGGGTCG | TTTACTAGGTCAACAATGCACT |
| | GGTTACACTCACCGCCGACAAATCCACTTCCACTGCTTATA | GGGTGCGACAAGCTCCCGGTC |
| | TGGAACTTTCCTCTCTCCGCAGTGAGGACACAGCAGTGTA | AGGGTTTGGAGTGGATGGGA |
| | CTATTGTGCCTCCCCTCAAGTGCATTATGACTACGCTGGTT | TACATAAACCCCTCATCAGCCT |
| | TCCCTTACTGGGGACAAGGTACTCTGGTTACAGTTTCTTCC | ACACAAATTATGCACAAAAAT |
| | GGCGGCTCCGAGGGCAAGAGCAGCGGCAGCGGCAGCGA | TTCAGGGTCGGGTTACACTCA |
| | GAGCAAGAGCACCGGCGGCAGCGAAATAGTGCTGACCCA | CCGCCGACAAATCCACTTCCAC |
| | GAGCCCCGCTACCCTTTCTGCAAGTCCTGGGGAACGTGTT | TGCTTATATGGAACTTTCCTCT |
| | ACATTGTCTTGTAGCGCTTCTTCATCAGTCTCCTATATGAAT | CTCCGCAGTGAGGACACAGCA |
| | TGGTATCAACAAAAACCAGGACAAGCTCCTCGGCGGTGGA | GTGTACTATTGTGCCTCCCCTC |
| | TCTACGACAGTTCCAAACTTGCCTCTGGTGTGCCTGCTCGG | AAGTGCATTATGACTACGCTG |
| | TTTAGTGGGTCTGGAAGTGGACGAGATTATACTCTGACCA | GTTTCCCTTACTGGGGACAAG |
| | TCAGTTCCTTGGAACCCGAGGATTTTGCTGTTTATTACTGC | GTACTCTGGTTACAGTTTCTTC |
| | CAACAATGGAGTAGAAACCCTCCAACCTTTGGAGGTGGAA | CGGCGGCTCCGAGGGCAAGA |
| | CTAAGGTCGAGATAAAGGAGCCCAAATCTAGCGACAAAA | GCAGCGGCAGCGGCAGCGAG |
| | CTCACACATGTCCACCGTGCCCAGCACCTGAAGCAGCAGG | AGCAAGAGCACCGGCGGCAG |
| | GGGACCGTCAGTCTTCCTCTTCCCCCCAAAACCCAAGGACA | CGAAATAGTGCTGACCCAGAG |
| | CCCTCATGATCTCCCGGACCCCTGAGGTCACATGCGTGGT | CCCCGCTACCCTTTCTGCAAGT |
| | GGTGAGCGTGAGCCACGAAGACCCTGAGGTCAAGTTCAA | CCTGGGGAACGTGTTACATTG |
| | CTGGTACGTGGACGGCGTGGAGGTGCATAATGCCAAGAC | TCTTGTAGCGCTTCTTCATCAG |
| | AAAGCCGCGGGAGGAGCAGTACAACAGCACGTACCGTGT | TCTCCTATATGAATTGGTATCA |
| | GGTCAGCGTCCTCACCGTCCTGCACCAGGACTGGCTGAAT | ACAAAAACCAGGACAAGCTCC |
| | GGCAAGGAGTACAAGTGCAAGGTCTCCAACAAAGCCCTCC | TCGGCGGTGGATCTACGACAG |
| | CAGCCCCCATCGAGAAAACCATCTCCAAAGCCAAAGGGCA | TTCCAAACTTGCCTCTGGTGTG |
| | GCCCCGAGAACCACAGGTGTACGTGTACCCCCCATCCCGG | CCTGCTCGGTTTAGTGGGTCT |
| | GAGGAGATGACCAAGAACCAGGTCAGCCTGACCTGCCTG | GGAAGTGGACGAGATTATACT |
| | GTCAAAGGCTTCTATCCCAGCGACATCGCCGTGGAGTGGG | CTGACCATCAGTTCCTTGGAAC |
| | AGAGCAATGGGCAGCCGGAGAACAACTACAAGACCACGC | CCGAGGATTTTGCTGTTTATTA |
| | CTCCCGTGCTGGACTCCGACGGCTCCTTCGCCCTCGTGAGC | CTGCCAACAATGGAGTAGAAA |
| | AAGCTCACCGTGGACAAGTCTAGATGGCAGCAGGGGAAC | CCCTCCAACCTTTGGAGGTGG |
| | GTCTTCTCATGCTCCGTGATGCATGAGGCTCTGCACAACCA | AACTAAGGTCGAGATAAAGG |
| | CTACACGCAGAAGAGCCTCTCCCTGTCTCCGGGT | (193) |
| | (192) | |
| CD3B2089- | CAGGTACAACTCGTGCAAAGTGGTGCTGAAGTGAAGAAA | CAGGTACAACTCGTGCAAAGT |
| HL-scFv | CCTGGATCAAGCGTCAAGGTATCCTGTAAAGCATCAGGAT | GGTGCTGAAGTGAAGAAACCT |
| | ACACCTTCACACGCAGTACTATGCATTGGGTGCGTCAAGC | GGATCAAGCGTCAAGGTATCC |
| | CCCCGGACAGGGCCTGGAATGGATGGGCTACATAAACCCT | TGTAAAGCATCAGGATACACC |
| | TCTTCCGCCTACACCAATTATGCCCAAAAGTTCCAGGGAAG | TTCACACGCAGTACTATGCATT |
| | GGTGACTCTGACTGCTGATAAAAGTACTAGCACCGCATAC | GGGTGCGTCAAGCCCCCGGAC |
| | ATGGAACTGTCTTCACTGAGAAGCGAGGACACCGCCGTCT | AGGGCCTGGAATGGATGGGC |
| | ATTATTGTGCATCCCCCCAAGTCCACTATGATTACAACGGA | TACATAAACCCTTCTTCCGCCT |
| | TTTCCTTACTGGGGCCAGGGAACCTTGGTCACCGTGTCTTC | ACACCAATTATGCCCAAAAGT |
| | CGGCGGCTCCGAGGGCAAGAGCAGCGGCAGCGGCAGCG | TCCAGGGAAGGGTGACTCTGA |
| | AGAGCAAGAGCACCGGCGGCAGCGAAATCGTTCTCACAC | CTGCTGATAAAAGTACTAGCA |
| | AGAGCCCTGCAACATTGTCAGCTTCACCCGGTGAACGAGT | CCGCATACATGGAACTGTCTTC |
| | AACATTGTCCTGTTCTGCCTCAAGTAGTGTGAGCTATATGA | ACTGAGAAGCGAGGACACCG |
| | ATTGGTATCAACAAAAACCAGGGCAGGCCCCTAGAAGGT | CCGTCTATTATTGTGCATCCCC |
| | GGATCTATGATTCAAGCAAACTGGCATCCGGCGTCCCTGC | CCAAGTCCACTATGATTACAAC |
| | CCGCTTTAGTGGAAGCGGTTCAGGAAGGGACTATACTCTT | GGATTTCCTTACTGGGGCCAG |
| | ACTATCTCCAGCCTTGAACCTGAAGATTTTGCAGTCTACTA | GGAACCTTGGTCACCGTGTCT |
| | CTGCCAACAATGGTCTAGGAATCCCCCCACTTTTGGTGGA | TCCGGCGGCTCCGAGGGCAA |
| | GGGACCAAAGTTGAGATCAAAGAGCCCAAATCTAGCGAC | GAGCAGCGGCAGCGGCAGCG |
| | AAAACTCACACATGTCCACCGTGCCCAGCACCTGAAGCAG | AGAGCAAGAGCACCGGCGGC |
| | CAGGGGGACCGTCAGTCTTCCTCTTCCCCCCAAAACCCAAG | AGCGAAATCGTTCTCACACAG |
| | GACACCCTCATGATCTCCCGGACCCCTGAGGTCACATGCGT | AGCCCTGCAACATTGTCAGCTT |
| | GGTGGTGAGCGTGAGCCACGAAGACCCTGAGGTCAAGTT | CACCCGGTGAACGAGTAACAT |
| | CAACTGGTACGTGGACGGCGTGGAGGTGCATAATGCCAA | TGTCCTGTTCTGCCTCAAGTAG |
| | GACAAAGCCGCGGGAGGAGCAGTACAACAGCACGTACCG | TGTGAGCTATATGAATTGGTA |
| | TGTGGTCAGCGTCCTCACCGTCCTGCACCAGGACTGGCTG | TCAACAAAAACCAGGGCAGGC |
| | AATGGCAAGGAGTACAAGTGCAAGGTCTCCAACAAAGCC | CCCTAGAAGGTGGATCTATGA |
| | CTCCCAGCCCCCATCGAGAAAACCATCTCCAAAGCCAAAG | TTCAAGCAAACTGGCATCCGG |
| | GGCAGCCCCGAGAACCACAGGTGTACGTGTACCCCCCATC | CGTCCCTGCCCGCTTTAGTGG |
| | CCGGGAGGAGATGACCAAGAACCAGGTCAGCCTGACCTG | AAGCGGTTCAGGAAGGGACT |
| | CCTGGTCAAAGGCTTCTATCCCAGCGACATCGCCGTGGAG | ATACTCTTACTATCTCCAGCCT |
| | TGGGAGAGCAATGGGCAGCCGGAGAACAACTACAAGACC | TGAACCTGAAGATTTTGCAGT |
| | ACGCCTCCCGTGCTGGACTCCGACGGCTCCTTCGCCCTCGT | CTACTACTGCCAACAATGGTCT |
| | GAGCAAGCTCACCGTGGACAAGTCTAGATGGCAGCAGGG | AGGAATCCCCCCACTTTTGGT |
| | GAACGTCTTCTCATGCTCCGTGATGCATGAGGCTCTGCACA | GGAGGGACCAAAGTTGAGAT |
| | ACCACTACACGCAGAAGAGCCTCTCCCTGTCTCCGGGT | CAAAG |
| | (194) | (195) |
| CD3B2051- | CAAGTGCAACTCGTACAATCTGGCGCTGAGGTTAAGAAAC | CAAGTGCAACTCGTACAATCT |
| N106S- | CTGGTAGCTCTGTTAAAGTGTCTTGTAAAGCATCCGGGTAT | GGCGCTGAGGTTAAGAAACCT |
| HL-scFv | ACTTTTACCCGGTCAACTATGCACTGGGTAAAACAAGCTCC | GGTAGCTCTGTTAAAGTGTCTT |
| | TGGACAAGGTTTGGAGTGGATGGGTTATATAAATCCCTCC | GTAAAGCATCCGGGTATACTT |
| | TCAGCATACACTAACTACAACCAGAAGTTCCAGGGGCGCG | TTACCCGGTCAACTATGCACTG |
| | TTACCCTGACTGCCGATAAGAGTACTTCAACTGCTTATATG | GGTAAAACAAGCTCCTGGACA |
| | GAGCTGTCATCCCTGCGTAGCGAGGACACAGCAGTATACT | AGGTTTGGAGTGGATGGGTTA |
| | ACTGCGCCAGTCCACAGGTACACTACGATTACAGTGGCTTT | TATAAATCCCTCCTCAGCATAC |
| | CCATACTGGGGGCAGGGCACTCTGGTAACAGTATCTAGTG | ACTAACTACAACCAGAAGTTC |
| | GCGGCTCCGAGGGCAAGAGCAGCGGCAGCGGCAGCGAG | CAGGGGCGCGTTACCCTGACT |
| | AGCAAGAGCACCGGCGGCAGCGAGATTGTACTCACCCAG | GCCGATAAGAGTACTTCAACT |
| | TCTCCAGCTACCCTTAGTGCTTCACCTGGTGAGCGCGTGAC | GCTTATATGGAGCTGTCATCCC |
| | ATTGTCCTGCTCCGCAAGCTCCAGTGTTTCATATATGAATT | TGCGTAGCGAGGACACAGCA |
| | GGTACCAACAAAAGCCTGGGCAAGCACCACGCCGGCTGA | GTATACTACTGCGCCAGTCCA |
| | TCTACGACAGCTCCAAGCTCGCAAGCGGTGTACCTGCTCG | CAGGTACACTACGATTACAGT |
| | CTTTTCCGGCAGCGGGTCAGGTCGAGATTATACTCTGACC | GGCTTTCCATACTGGGGGCAG |
| | ATTTCATCACTCGAACCCGAAGACTTTGCAGTGTATTACTG | GGCACTCTGGTAACAGTATCT |
| | TCAACAGTGGAGTAGGAATCCACCAACATTTGGGGGTGGC | AGTGGCGGCTCCGAGGGCAA |
| | ACCAAGGTTGAGATAAAGGAGCCCAAATCTAGCGACAAA | GAGCAGCGGCAGCGGCAGCG |
| | ACTCACACATGTCCACCGTGCCCAGCACCTGAAGCAGCAG | AGAGCAAGAGCACCGGCGGC |
| | GGGGACCGTCAGTCTTCCTCTTCCCCCCAAAACCCAAGGAC | AGCGAGATTGTACTCACCCAG |
| | ACCCTCATGATCTCCCGGACCCCTGAGGTCACATGCGTGGT | TCTCCAGCTACCCTTAGTGCTT |
| | GGTGAGCGTGAGCCACGAAGACCCTGAGGTCAAGTTCAA | CACCTGGTGAGCGCGTGACAT |
| | CTGGTACGTGGACGGCGTGGAGGTGCATAATGCCAAGAC | TGTCCTGCTCCGCAAGCTCCA |
| | AAAGCCGCGGGAGGAGCAGTACAACAGCACGTACCGTGT | GTGTTTCATATATGAATTGGTA |
| | GGTCAGCGTCCTCACCGTCCTGCACCAGGACTGGCTGAAT | CCAACAAAAGCCTGGGCAAGC |
| | GGCAAGGAGTACAAGTGCAAGGTCTCCAACAAAGCCCTCC | ACCACGCCGGCTGATCTACGA |
| | CAGCCCCCATCGAGAAAACCATCTCCAAAGCCAAAGGGCA | CAGCTCCAAGCTCGCAAGCGG |
| | GCCCCGAGAACCACAGGTGTACGTGTACCCCCCATCCCGG | TGTACCTGCTCGCTTTTCCGGC |
| | GAGGAGATGACCAAGAACCAGGTCAGCCTGACCTGCCTG | AGCGGGTCAGGTCGAGATTAT |
| | GTCAAAGGCTTCTATCCCAGCGACATCGCCGTGGAGTGGG | ACTCTGACCATTTCATCACTCG |
| | AGAGCAATGGGCAGCCGGAGAACAACTACAAGACCACGC | AACCCGAAGACTTTGCAGTGT |
| | CTCCCGTGCTGGACTCCGACGGCTCCTTCGCCCTCGTGAGC | ATTACTGTCAACAGTGGAGTA |
| | AAGCTCACCGTGGACAAGTCTAGATGGCAGCAGGGGAAC | GGAATCCACCAACATTTGGGG |
| | GTCTTCTCATGCTCCGTGATGCATGAGGCTCTGCACAACCA | GTGGCACCAAGGTTGAGATAA |
| | CTACACGCAGAAGAGCCTCTCCCTGTCTCCGGGT | AGG |
| | (196) | (197) |
| CD3B2051- | CAGGTACAGTTGGTCCAAAGTGGCGCAGAGGTAAAGAAA | CAGGTACAGTTGGTCCAAAGT |
| N106Q- | CCAGGTTCTTCAGTCAAGGTAAGTTGCAAGGCATCTGGAT | GGCGCAGAGGTAAAGAAACC |
| HL-scFv | ATACATTTACCCGCAGTACTATGCATTGGGTCAAACAGGCT | AGGTTCTTCAGTCAAGGTAAG |
| | CCAGGACAGGGGCTTGAATGGATGGGTTACATCAACCCAT | TTGCAAGGCATCTGGATATAC |
| | CTAGTGCCTATACAAACTATAATCAGAAATTTCAGGGCAG | ATTTACCCGCAGTACTATGCAT |
| | AGTGACTCTGACAGCCGACAAATCAACCTCTACAGCATAT | TGGGTCAAACAGGCTCCAGGA |
| | ATGGAGTTGTCCTCTCTCCGTAGTGAAGATACTGCCGTCTA | CAGGGGCTTGAATGGATGGG |
| | CTATTGTGCAAGCCCCCAAGTCCACTATGATTATCAGGGTT | TTACATCAACCCATCTAGTGCC |
| | TCCCTTACTGGGGGCAGGGTACTTTGGTTACCGTTTCATCC | TATACAAACTATAATCAGAAA |
| | GGCGGCTCCGAGGGCAAGAGCAGCGGCAGCGGCAGCGA | TTTCAGGGCAGAGTGACTCTG |
| | GAGCAAGAGCACCGGCGGCAGCGAGATCGTGTTGACTCA | ACAGCCGACAAATCAACCTCT |
| | AAGTCCTGCAACCCTGTCTGCTAGTCCAGGGGAGAGGGTT | ACAGCATATATGGAGTTGTCC |
| | ACTCTCAGTTGTTCTGCAAGCAGTAGCGTATCCTACATGAA | TCTCTCCGTAGTGAAGATACT |
| | CTGGTATCAACAAAAGCCTGGTCAGGCACCACGGCGGTTG | GCCGTCTACTATTGTGCAAGC |
| | ATATATGACTCCTCCAAGTTGGCCTCTGGGGTGCCCGCAA | CCCCAAGTCCACTATGATTATC |
| | GATTCTCCGGGTCCGGCTCTGGCCGCGATTACACACTGAC | AGGGTTTCCCTTACTGGGGGC |
| | TATAAGCAGTCTGGAACCAGAGGATTTTGCCGTTTACTACT | AGGGTACTTTGGTTACCGTTTC |
| | GCCAACAATGGAGCCGAAACCCCCCAACCTTTGGAGGTGG | ATCCGGCGGCTCCGAGGGCAA |
| | CACTAAGGTAGAGATAAAGGAGCCCAAATCTAGCGACAA | GAGCAGCGGCAGCGGCAGCG |
| | AACTCACACATGTCCACCGTGCCCAGCACCTGAAGCAGCA | AGAGCAAGAGCACCGGCGGC |
| | GGGGGACCGTCAGTCTTCCTCTTCCCCCCAAAACCCAAGG | AGCGAGATCGTGTTGACTCAA |
| | ACACCCTCATGATCTCCCGGACCCCTGAGGTCACATGCGTG | AGTCCTGCAACCCTGTCTGCTA |
| | GTGGTGAGCGTGAGCCACGAAGACCCTGAGGTCAAGTTC | GTCCAGGGGAGAGGGTTACTC |
| | AACTGGTACGTGGACGGCGTGGAGGTGCATAATGCCAAG | TCAGTTGTTCTGCAAGCAGTA |
| | ACAAAGCCGCGGGAGGAGCAGTACAACAGCACGTACCGT | GCGTATCCTACATGAACTGGT |
| | GTGGTCAGCGTCCTCACCGTCCTGCACCAGGACTGGCTGA | ATCAACAAAAGCCTGGTCAGG |
| | ATGGCAAGGAGTACAAGTGCAAGGTCTCCAACAAAGCCCT | CACCACGGCGGTTGATATATG |
| | CCCAGCCCCCATCGAGAAAACCATCTCCAAAGCCAAAGGG | ACTCCTCCAAGTTGGCCTCTGG |
| | CAGCCCCGAGAACCACAGGTGTACGTGTACCCCCCATCCC | GGTGCCCGCAAGATTCTCCGG |
| | GGGAGGAGATGACCAAGAACCAGGTCAGCCTGACCTGCC | GTCCGGCTCTGGCCGCGATTA |
| | TGGTCAAAGGCTTCTATCCCAGCGACATCGCCGTGGAGTG | CACACTGACTATAAGCAGTCT |
| | GGAGAGCAATGGGCAGCCGGAGAACAACTACAAGACCAC | GGAACCAGAGGATTTTGCCGT |
| | GCCTCCCGTGCTGGACTCCGACGGCTCCTTCGCCCTCGTGA | TTACTACTGCCAACAATGGAG |
| | GCAAGCTCACCGTGGACAAGTCTAGATGGCAGCAGGGGA | CCGAAACCCCCCAACCTTTGG |
| | ACGTCTTCTCATGCTCCGTGATGCATGAGGCTCTGCACAAC | AGGTGGCACTAAGGTAGAGA |
| | CACTACACGCAGAAGAGCCTCTCCCTGTCTCCGGGT | TAAAGG |
| | (198) | (199) |
| CD3B2051- | CAAGTTCAACTGGTCCAAAGCGGTGCTGAAGTTAAAAAGC | CAAGTTCAACTGGTCCAAAGC |
| N106G- | CAGGAAGCAGTGTTAAAGTCTCATGTAAGGCCAGCGGTTA | GGTGCTGAAGTTAAAAAGCCA |
| HL-scFv | CACTTTTACTAGGAGTACCATGCACTGGGTGAAGCAGGCC | GGAAGCAGTGTTAAAGTCTCA |
| | CCCGGTCAGGGTCTTGAGTGGATGGGATATATAAACCCAT | TGTAAGGCCAGCGGTTACACT |
| | CATCCGCCTACACTAATTACAACCAAAAGTTTCAGGGTCGC | TTTACTAGGAGTACCATGCACT |
| | GTGACTTTGACCGCCGACAAATCTACCAGCACAGCCTACAT | GGGTGAAGCAGGCCCCCGGT |
| | GGAACTCAGTTCTCTCCGATCCGAAGATACCGCTGTATATT | CAGGGTCTTGAGTGGATGGG |
| | ACTGTGCTTCCCCACAAGTACACTATGATTACGGGGGCTTC | ATATATAAACCCATCATCCGCC |
| | CCATACTGGGGCCAGGGAACTCTCGTCACAGTATCATCCG | TACACTAATTACAACCAAAAG |
| | GCGGCTCCGAGGGCAAGAGCAGCGGCAGCGGCAGCGAG | TTTCAGGGTCGCGTGACTTTG |
| | AGCAAGAGCACCGGCGGCAGCGAAATTGTTCTTACACAAA | ACCGCCGACAAATCTACCAGC |
| | GTCCTGCTACACTGTCAGCCAGCCCCGGTGAGCGAGTCAC | ACAGCCTACATGGAACTCAGT |
| | ATTGTCATGCTCTGCTTCCAGTAGTGTGAGCTACATGAACT | TCTCTCCGATCCGAAGATACC |
| | GGTACCAACAGAAACCTGGTCAGGCTCCAAGGCGCTTGAT | GCTGTATATTACTGTGCTTCCC |
| | ATACGACAGCAGCAAACTGGCAAGTGGTGTACCTGCTCGG | CACAAGTACACTATGATTACG |
| | TTTTCTGGATCAGGCTCAGGTAGAGACTATACTCTCACCAT | GGGGCTTCCCATACTGGGGCC |
| | TTCCTCTCTGGAACCTGAGGACTTTGCTGTTTATTATTGCCA | AGGGAACTCTCGTCACAGTAT |
| | GCAGTGGAGTCGCAACCCTCCCACCTTCGGTGGAGGGACA | CATCCGGCGGCTCCGAGGGCA |
| | AAAGTAGAAATAAAGGAGCCCAAATCTAGCGACAAAACTC | AGAGCAGCGGCAGCGGCAGC |
| | ACACATGTCCACCGTGCCCAGCACCTGAAGCAGCAGGGG | GAGAGCAAGAGCACCGGCGG |
| | GACCGTCAGTCTTCCTCTTCCCCCCAAAACCCAAGGACACC | CAGCGAAATTGTTCTTACACA |
| | CTCATGATCTCCCGGACCCCTGAGGTCACATGCGTGGTGG | AAGTCCTGCTACACTGTCAGC |
| | TGAGCGTGAGCCACGAAGACCCTGAGGTCAAGTTCAACTG | CAGCCCCGGTGAGCGAGTCAC |
| | GTACGTGGACGGCGTGGAGGTGCATAATGCCAAGACAAA | ATTGTCATGCTCTGCTTCCAGT |
| | GCCGCGGGAGGAGCAGTACAACAGCACGTACCGTGTGGT | AGTGTGAGCTACATGAACTGG |
| | CAGCGTCCTCACCGTCCTGCACCAGGACTGGCTGAATGGC | TACCAACAGAAACCTGGTCAG |
| | AAGGAGTACAAGTGCAAGGTCTCCAACAAAGCCCTCCCAG | GCTCCAAGGCGCTTGATATAC |
| | CCCCCATCGAGAAAACCATCTCCAAAGCCAAAGGGCAGCC | GACAGCAGCAAACTGGCAAGT |
| | CCGAGAACCACAGGTGTACGTGTACCCCCCATCCCGGGAG | GGTGTACCTGCTCGGTTTTCTG |
| | GAGATGACCAAGAACCAGGTCAGCCTGACCTGCCTGGTCA | GATCAGGCTCAGGTAGAGACT |
| | AAGGCTTCTATCCCAGCGACATCGCCGTGGAGTGGGAGA | ATACTCTCACCATTTCCTCTCT |
| | GCAATGGGCAGCCGGAGAACAACTACAAGACCACGCCTC | GGAACCTGAGGACTTTGCTGT |
| | CCGTGCTGGACTCCGACGGCTCCTTCGCCCTCGTGAGCAA | TTATTATTGCCAGCAGTGGAG |
| | GCTCACCGTGGACAAGTCTAGATGGCAGCAGGGGAACGT | TCGCAACCCTCCCACCTTCGGT |
| | CTTCTCATGCTCCGTGATGCATGAGGCTCTGCACAACCACT | GGAGGGACAAAAGTAGAAAT |
| | ACACGCAGAAGAGCCTCTCCCTGTCTCCGGGT | AAAGG |
| | (200) | (201) |
| CD3B2051- | CAAGTTCAGTTGGTTCAATCCGGCGCTGAGGTCAAAAAAC | CAAGTTCAGTTGGTTCAATCC |
| N106A- | CTGGATCATCTGTGAAAGTCTCATGTAAGGCATCTGGTTAT | GGCGCTGAGGTCAAAAAACCT |
| HL-scFv | ACCTTCACTCGGAGTACCATGCATTGGGTTAAGCAGGCCC | GGATCATCTGTGAAAGTCTCA |
| | CCGGTCAGGGGTTGGAGTGGATGGGTTACATCAACCCTTC | TGTAAGGCATCTGGTTATACCT |
| | CTCAGCCTACACAAATTATAATCAGAAATTTCAGGGGCGC | TCACTCGGAGTACCATGCATT |
| | GTTACTCTCACCGCTGACAAGTCCACCTCCACAGCCTATAT | GGGTTAAGCAGGCCCCCGGTC |
| | GGAGCTGTCAAGCCTGCGGAGTGAGGATACAGCCGTATA | AGGGGTTGGAGTGGATGGGT |
| | TTACTGTGCCAGTCCTCAGGTTCATTATGATTACGCTGGCT | TACATCAACCCTTCCTCAGCCT |
| | TCCCATATTGGGGTCAGGGGACTCTCGTCACTGTGTCCAG | ACACAAATTATAATCAGAAAT |
| | CGGCGGCTCCGAGGGCAAGAGCAGCGGCAGCGGCAGCG | TTCAGGGGCGCGTTACTCTCA |
| | AGAGCAAGAGCACCGGCGGCAGCGAAATTGTATTGACTC | CCGCTGACAAGTCCACCTCCA |
| | AGTCCCCAGCTACATTGAGCGCAAGTCCTGGCGAGAGAGT | CAGCCTATATGGAGCTGTCAA |
| | AACCCTGTCTTGTTCTGCCAGTAGTAGTGTAAGCTACATGA | GCCTGCGGAGTGAGGATACA |
| | ACTGGTATCAGCAGAAACCCGGACAGGCCCCACGCCGACT | GCCGTATATTACTGTGCCAGTC |
| | TATCTATGATTCAAGTAAGCTCGCTAGTGGGGTTCCAGCCA | CTCAGGTTCATTATGATTACGC |
| | GATTTAGTGGTTCTGGCTCTGGACGCGATTACACTCTGACC | TGGCTTCCCATATTGGGGTCA |
| | ATTTCTTCTCTGGAGCCTGAGGACTTCGCAGTATATTACTG | GGGGACTCTCGTCACTGTGTC |
| | CCAACAATGGTCACGCAATCCACCAACATTCGGTGGAGGG | CAGCGGCGGCTCCGAGGGCA |
| | ACAAAAGTGGAAATCAAAGAGCCCAAATCTAGCGACAAA | AGAGCAGCGGCAGCGGCAGC |
| | ACTCACACATGTCCACCGTGCCCAGCACCTGAAGCAGCAG | GAGAGCAAGAGCACCGGCGG |
| | GGGGACCGTCAGTCTTCCTCTTCCCCCCAAAACCCAAGGAC | CAGCGAAATTGTATTGACTCA |
| | ACCCTCATGATCTCCCGGACCCCTGAGGTCACATGCGTGGT | GTCCCCAGCTACATTGAGCGC |
| | GGTGAGCGTGAGCCACGAAGACCCTGAGGTCAAGTTCAA | AAGTCCTGGCGAGAGAGTAAC |
| | CTGGTACGTGGACGGCGTGGAGGTGCATAATGCCAAGAC | CCTGTCTTGTTCTGCCAGTAGT |
| | AAAGCCGCGGGAGGAGCAGTACAACAGCACGTACCGTGT | AGTGTAAGCTACATGAACTGG |
| | GGTCAGCGTCCTCACCGTCCTGCACCAGGACTGGCTGAAT | TATCAGCAGAAACCCGGACAG |
| | GGCAAGGAGTACAAGTGCAAGGTCTCCAACAAAGCCCTCC | GCCCCACGCCGACTTATCTATG |
| | CAGCCCCCATCGAGAAAACCATCTCCAAAGCCAAAGGGCA | ATTCAAGTAAGCTCGCTAGTG |
| | GCCCCGAGAACCACAGGTGTACGTGTACCCCCCATCCCGG | GGGTTCCAGCCAGATTTAGTG |
| | GAGGAGATGACCAAGAACCAGGTCAGCCTGACCTGCCTG | GTTCTGGCTCTGGACGCGATT |
| | GTCAAAGGCTTCTATCCCAGCGACATCGCCGTGGAGTGGG | ACACTCTGACCATTTCTTCTCT |
| | AGAGCAATGGGCAGCCGGAGAACAACTACAAGACCACGC | GGAGCCTGAGGACTTCGCAGT |
| | CTCCCGTGCTGGACTCCGACGGCTCCTTCGCCCTCGTGAGC | ATATTACTGCCAACAATGGTC |
| | AAGCTCACCGTGGACAAGTCTAGATGGCAGCAGGGGAAC | ACGCAATCCACCAACATTCGG |
| | GTCTTCTCATGCTCCGTGATGCATGAGGCTCTGCACAACCA | TGGAGGGACAAAAGTGGAAA |
| | CTACACGCAGAAGAGCCTCTCCCTGTCTCCGGGT | TCAAAG |
| | (202) | (203) |
| CD3B2051- | CAAGTGCAGTTGGTGCAGAGTGGGGCTGAGGTTAAAAAG | CAAGTGCAGTTGGTGCAGAGT |
| HL-scFv | CCTGGTTCCAGTGTGAAAGTCAGTTGTAAAGCCTCCGGGT | GGGGCTGAGGTTAAAAAGCCT |
| | ACACTTTTACTAGGTCAACAATGCACTGGGTCAAGCAAGC | GGTTCCAGTGTGAAAGTCAGT |
| | CCCCGGCCAAGGCTTGGAATGGATGGGGTACATAAATCCA | TGTAAAGCCTCCGGGTACACT |
| | AGCAGTGCCTACACCAACTATAACCAAAAATTTCAAGGTA | TTTACTAGGTCAACAATGCACT |
| | GAGTAACATTGACTGCTGACAAGTCCACATCAACTGCTTAT | GGGTCAAGCAAGCCCCCGGCC |
| | ATGGAGCTGTCCTCTCTTCGGTCTGAAGATACCGCCGTATA | AAGGCTTGGAATGGATGGGG |
| | CTATTGCGCCTCCCCCCAAGTCCACTACGACTATAACGGAT | TACATAAATCCAAGCAGTGCC |
| | TTCCCTACTGGGGACAAGGAACCCTGGTAACAGTTTCTTCA | TACACCAACTATAACCAAAAA |
| | GGCGGCTCCGAGGGCAAGAGCAGCGGCAGCGGCAGCGA | TTTCAAGGTAGAGTAACATTG |
| | GAGCAAGAGCACCGGCGGCAGCGAGATAGTTCTTACACA | ACTGCTGACAAGTCCACATCA |
| | GAGCCCTGCAACCTTGAGTGCAAGTCCAGGGGAACGGGT | ACTGCTTATATGGAGCTGTCCT |
| | GACTCTGAGTTGTAGTGCTTCTAGTTCCGTAAGTTATATGA | CTCTTCGGTCTGAAGATACCG |
| | ACTGGTACCAACAGAAGCCAGGTCAAGCACCAAGACGCCT | CCGTATACTATTGCGCCTCCCC |
| | TATCTACGACTCATCTAAACTTGCTAGTGGAGTGCCAGCCA | CCAAGTCCACTACGACTATAA |
| | GATTTTCCGGTTCAGGAAGTGGGAGGGACTACACACTTAC | CGGATTTCCCTACTGGGGACA |
| | CATCTCATCCCTTGAGCCCGAAGATTTCGCCGTATATTACT | AGGAACCCTGGTAACAGTTTC |
| | GTCAACAATGGTCAAGAAATCCTCCTACATTTGGTGGTGG | TTCAGGCGGCTCCGAGGGCAA |
| | TACAAAAGTAGAGATCAAGGAGCCCAAATCTAGCGACAAA | GAGCAGCGGCAGCGGCAGCG |
| | ACTCACACATGTCCACCGTGCCCAGCACCTGAAGCAGCAG | AGAGCAAGAGCACCGGCGGC |
| | GGGGACCGTCAGTCTTCCTCTTCCCCCCAAAACCCAAGGAC | AGCGAGATAGTTCTTACACAG |
| | ACCCTCATGATCTCCCGGACCCCTGAGGTCACATGCGTGGT | AGCCCTGCAACCTTGAGTGCA |
| | GGTGAGCGTGAGCCACGAAGACCCTGAGGTCAAGTTCAA | AGTCCAGGGGAACGGGTGAC |
| | CTGGTACGTGGACGGCGTGGAGGTGCATAATGCCAAGAC | TCTGAGTTGTAGTGCTTCTAGT |
| | AAAGCCGCGGGAGGAGCAGTACAACAGCACGTACCGTGT | TCCGTAAGTTATATGAACTGG |
| | GGTCAGCGTCCTCACCGTCCTGCACCAGGACTGGCTGAAT | TACCAACAGAAGCCAGGTCAA |
| | GGCAAGGAGTACAAGTGCAAGGTCTCCAACAAAGCCCTCC | GCACCAAGACGCCTTATCTAC |
| | CAGCCCCCATCGAGAAAACCATCTCCAAAGCCAAAGGGCA | GACTCATCTAAACTTGCTAGTG |
| | GCCCCGAGAACCACAGGTGTACGTGTACCCCCCATCCCGG | GAGTGCCAGCCAGATTTTCCG |
| | GAGGAGATGACCAAGAACCAGGTCAGCCTGACCTGCCTG | GTTCAGGAAGTGGGAGGGAC |
| | GTCAAAGGCTTCTATCCCAGCGACATCGCCGTGGAGTGGG | TACACACTTACCATCTCATCCC |
| | AGAGCAATGGGCAGCCGGAGAACAACTACAAGACCACGC | TTGAGCCCGAAGATTTCGCCG |
| | CTCCCGTGCTGGACTCCGACGGCTCCTTCGCCCTCGTGAGC | TATATTACTGTCAACAATGGTC |
| | AAGCTCACCGTGGACAAGTCTAGATGGCAGCAGGGGAAC | AAGAAATCCTCCTACATTTGGT |
| | GTCTTCTCATGCTCCGTGATGCATGAGGCTCTGCACAACCA | GGTGGTACAAAAGTAGAGATC |
| | CTACACGCAGAAGAGCCTCTCCCTGTCTCCGGGT | AAGG |
| | (204) | (205) |
| CD3B2030- | CAAGTACAGCTCGTTCAGTCCGGTGCAGAAGTCAAGAAAC | CAAGTACAGCTCGTTCAGTCC |
| N106S- | CAGGAAGTAGCGTAAAAGTGTCATGTAAAGCAAGTGGTT | GGTGCAGAAGTCAAGAAACC |
| HL-scFv | ATACCTTTACACGCTCAACTATGCATTGGGTTAAGCAGGCT | AGGAAGTAGCGTAAAAGTGTC |
| | CCAGGACAAGGGCTTGAGTGGATAGGATACATCAATCCAT | ATGTAAAGCAAGTGGTTATAC |
| | CTAGCGCCTACACAAATTATAACCAGAAGTTCCAGGGGAG | CTTTACACGCTCAACTATGCAT |
| | AGTTACCCTCACTGCCGATAAGTCCACATCAACCGCCTATA | TGGGTTAAGCAGGCTCCAGGA |
| | TGGAATTGAGTTCCCTTCGTAGTGAGGACACTGCCGTCTA | CAAGGGCTTGAGTGGATAGG |
| | CTACTGTGCCTCCCCTCAGGTTCATTATGATTACTCAGGTTT | ATACATCAATCCATCTAGCGCC |
| | TCCATACTGGGGCCAGGGCACCCTCGTAACAGTAAGCAGC | TACACAAATTATAACCAGAAG |
| | GGCGGCTCCGAGGGCAAGAGCAGCGGCAGCGGCAGCGA | TTCCAGGGGAGAGTTACCCTC |
| | GAGCAAGAGCACCGGCGGCAGCGAAATTGTCCTGACTCA | ACTGCCGATAAGTCCACATCA |
| | GTCTCCAGCCACACTGAGTGCATCTCCCGGCGAGCGGGTC | ACCGCCTATATGGAATTGAGT |
| | ACTCTTAGTTGCAGCGCCAGTTCTAGTGTATCATATATGAA | TCCCTTCGTAGTGAGGACACT |
| | CTGGTATCAGCAAAAGCCAGGTCAAGCTCCCAGGCGATGG | GCCGTCTACTACTGTGCCTCCC |
| | ATATACGACTCATCAAAACTCGCCTCTGGCGTCCCAGCCCG | CTCAGGTTCATTATGATTACTC |
| | GTTCTCCGGTTCCGGCTCTGGGCGCGACTATACCCTTACAA | AGGTTTTCCATACTGGGGCCA |
| | TTTCTAGCCTCGAACCAGAAGATTTTGCTGTATATTATTGT | GGGCACCCTCGTAACAGTAAG |
| | CAACAGTGGTCACGTAACCCACCAACCTTCGGTGGAGGGA | CAGCGGCGGCTCCGAGGGCA |
| | CAAAGGTCGAGATAAAAGAGCCCAAATCTAGCGACAAAA | AGAGCAGCGGCAGCGGCAGC |
| | CTCACACATGTCCACCGTGCCCAGCACCTGAAGCAGCAGG | GAGAGCAAGAGCACCGGCGG |
| | GGGACCGTCAGTCTTCCTCTTCCCCCCAAAACCCAAGGACA | CAGCGAAATTGTCCTGACTCA |
| | CCCTCATGATCTCCCGGACCCCTGAGGTCACATGCGTGGT | GTCTCCAGCCACACTGAGTGC |
| | GGTGAGCGTGAGCCACGAAGACCCTGAGGTCAAGTTCAA | ATCTCCCGGCGAGCGGGTCAC |
| | CTGGTACGTGGACGGCGTGGAGGTGCATAATGCCAAGAC | TCTTAGTTGCAGCGCCAGTTCT |
| | AAAGCCGCGGGAGGAGCAGTACAACAGCACGTACCGTGT | AGTGTATCATATATGAACTGG |
| | GGTCAGCGTCCTCACCGTCCTGCACCAGGACTGGCTGAAT | TATCAGCAAAAGCCAGGTCAA |
| | GGCAAGGAGTACAAGTGCAAGGTCTCCAACAAAGCCCTCC | GCTCCCAGGCGATGGATATAC |
| | CAGCCCCCATCGAGAAAACCATCTCCAAAGCCAAAGGGCA | GACTCATCAAAACTCGCCTCTG |
| | GCCCCGAGAACCACAGGTGTACGTGTACCCCCCATCCCGG | GCGTCCCAGCCCGGTTCTCCG |
| | GAGGAGATGACCAAGAACCAGGTCAGCCTGACCTGCCTG | GTTCCGGCTCTGGGCGCGACT |
| | GTCAAAGGCTTCTATCCCAGCGACATCGCCGTGGAGTGGG | ATACCCTTACAATTTCTAGCCT |
| | AGAGCAATGGGCAGCCGGAGAACAACTACAAGACCACGC | CGAACCAGAAGATTTTGCTGT |
| | CTCCCGTGCTGGACTCCGACGGCTCCTTCGCCCTCGTGAGC | ATATTATTGTCAACAGTGGTCA |
| | AAGCTCACCGTGGACAAGTCTAGATGGCAGCAGGGGAAC | CGTAACCCACCAACCTTCGGT |
| | GTCTTCTCATGCTCCGTGATGCATGAGGCTCTGCACAACCA | GGAGGGACAAAGGTCGAGAT |
| | CTACACGCAGAAGAGCCTCTCCCTGTCTCCGGGT | AAAAG |
| | (206) | (207) |
| CD3B2030- | CAGGTGCAACTGGTACAAAGTGGTGCCGAGGTGAAGAAG | CAGGTGCAACTGGTACAAAGT |
| N106G- | CCAGGGTCCAGTGTGAAAGTATCATGTAAAGCCAGCGGGT | GGTGCCGAGGTGAAGAAGCC |
| HL-scFv | ACACATTCACTAGGAGCACTATGCACTGGGTAAAGCAAGC | AGGGTCCAGTGTGAAAGTATC |
| | CCCAGGGCAAGGTTTGGAGTGGATCGGTTATATTAACCCT | ATGTAAAGCCAGCGGGTACAC |
| | TCATCTGCTTATACAAATTACAATCAGAAATTCCAAGGGAG | ATTCACTAGGAGCACTATGCA |
| | GGTCACTTTGACCGCTGACAAGTCTACCTCTACTGCATACA | CTGGGTAAAGCAAGCCCCAGG |
| | TGGAACTCTCCAGCCTTCGTTCAGAAGACACAGCCGTTTAT | GCAAGGTTTGGAGTGGATCG |
| | TACTGTGCCTCCCCACAGGTACACTACGACTACGGTGGATT | GTTATATTAACCCTTCATCTGC |
| | CCCATATTGGGGTCAAGGCACCCTTGTAACAGTATCAAGC | TTATACAAATTACAATCAGAA |
| | GGCGGCTCCGAGGGCAAGAGCAGCGGCAGCGGCAGCGA | ATTCCAAGGGAGGGTCACTTT |
| | GAGCAAGAGCACCGGCGGCAGCGAAATTGTACTCACACA | GACCGCTGACAAGTCTACCTC |
| | AAGTCCTGCAACTTTGTCTGCCTCACCAGGGGAAAGAGTA | TACTGCATACATGGAACTCTCC |
| | ACTCTTAGTTGTAGTGCTAGTTCATCCGTTTCTTATATGAAT | AGCCTTCGTTCAGAAGACACA |
| | TGGTATCAGCAGAAACCCGGACAAGCACCCCGGCGGTGG | GCCGTTTATTACTGTGCCTCCC |
| | ATATACGATTCCAGTAAACTTGCAAGCGGAGTCCCCGCAC | CACAGGTACACTACGACTACG |
| | GTTTCAGCGGCAGTGGCTCAGGCCGGGACTATACCCTGAC | GTGGATTCCCATATTGGGGTC |
| | TATTTCCTCCTTGGAACCTGAGGATTTTGCTGTGTACTACT | AAGGCACCCTTGTAACAGTAT |
| | GTCAGCAATGGAGTAGAAATCCTCCCACCTTTGGAGGTGG | CAAGCGGCGGCTCCGAGGGC |
| | CACTAAAGTAGAGATCAAAGAGCCCAAATCTAGCGACAAA | AAGAGCAGCGGCAGCGGCAG |
| | ACTCACACATGTCCACCGTGCCCAGCACCTGAAGCAGCAG | CGAGAGCAAGAGCACCGGCG |
| | GGGGACCGTCAGTCTTCCTCTTCCCCCCAAAACCCAAGGAC | GCAGCGAAATTGTACTCACAC |
| | ACCCTCATGATCTCCCGGACCCCTGAGGTCACATGCGTGGT | AAAGTCCTGCAACTTTGTCTGC |
| | GGTGAGCGTGAGCCACGAAGACCCTGAGGTCAAGTTCAA | CTCACCAGGGGAAAGAGTAAC |
| | CTGGTACGTGGACGGCGTGGAGGTGCATAATGCCAAGAC | TCTTAGTTGTAGTGCTAGTTCA |
| | AAAGCCGCGGGAGGAGCAGTACAACAGCACGTACCGTGT | TCCGTTTCTTATATGAATTGGT |
| | GGTCAGCGTCCTCACCGTCCTGCACCAGGACTGGCTGAAT | ATCAGCAGAAACCCGGACAAG |
| | GGCAAGGAGTACAAGTGCAAGGTCTCCAACAAAGCCCTCC | CACCCCGGCGGTGGATATACG |
| | CAGCCCCCATCGAGAAAACCATCTCCAAAGCCAAAGGGCA | ATTCCAGTAAACTTGCAAGCG |
| | GCCCCGAGAACCACAGGTGTACGTGTACCCCCCATCCCGG | GAGTCCCCGCACGTTTCAGCG |
| | GAGGAGATGACCAAGAACCAGGTCAGCCTGACCTGCCTG | GCAGTGGCTCAGGCCGGGACT |
| | GTCAAAGGCTTCTATCCCAGCGACATCGCCGTGGAGTGGG | ATACCCTGACTATTTCCTCCTT |
| | AGAGCAATGGGCAGCCGGAGAACAACTACAAGACCACGC | GGAACCTGAGGATTTTGCTGT |
| | CTCCCGTGCTGGACTCCGACGGCTCCTTCGCCCTCGTGAGC | GTACTACTGTCAGCAATGGAG |
| | AAGCTCACCGTGGACAAGTCTAGATGGCAGCAGGGGAAC | TAGAAATCCTCCCACCTTTGGA |
| | GTCTTCTCATGCTCCGTGATGCATGAGGCTCTGCACAACCA | GGTGGCACTAAAGTAGAGATC |
| | CTACACGCAGAAGAGCCTCTCCCTGTCTCCGGGT | AAAG |
| | (208) | (209) |
| CD3B2030- | CAAGTGCAACTCGTGCAAAGCGGGGCTGAAGTGAAGAAG | CAAGTGCAACTCGTGCAAAGC |
| N106A- | CCTGGATCAAGCGTGAAGGTCAGTTGCAAAGCCTCTGGAT | GGGGCTGAAGTGAAGAAGCC |
| HL-scFv | ATACCTTCACTCGATCAACCATGCACTGGGTCAAGCAGGC | TGGATCAAGCGTGAAGGTCAG |
| | CCCAGGGCAAGGGCTCGAATGGATAGGATATATTAACCCA | TTGCAAAGCCTCTGGATATAC |
| | AGTTCTGCCTACACTAACTATAATCAGAAGTTTCAAGGCCG | CTTCACTCGATCAACCATGCAC |
| | GGTAACACTTACAGCCGATAAGAGTACCTCAACAGCATAC | TGGGTCAAGCAGGCCCCAGG |
| | ATGGAACTTAGTTCTTTGCGGAGCGAGGATACCGCTGTGT | GCAAGGGCTCGAATGGATAG |
| | ATTACTGCGCTTCACCTCAGGTTCACTACGACTACGCTGGA | GATATATTAACCCAAGTTCTGC |
| | TTTCCCTATTGGGGTCAGGGTACACTGGTTACAGTTTCCTC | CTACACTAACTATAATCAGAA |
| | TGGCGGCTCCGAGGGCAAGAGCAGCGGCAGCGGCAGCG | GTTTCAAGGCCGGGTAACACT |
| | AGAGCAAGAGCACCGGCGGLAGCGAAATTGTTTTGACCC | TACAGCCGATAAGAGTACCTC |
| | AATCACCTGCCACTCTCTCTGCCTCTCCTGGTGAGCGAGTT | AACAGCATACATGGAACTTAG |
| | ACTTTGTCATGTAGCGCATCATCAAGTGTATCTTACATGAA | TTCTTTGCGGAGCGAGGATAC |
| | CTGGTACCAACAAAAACCCGGACAGGCACCACGTCGTTGG | CGCTGTGTATTACTGCGCTTCA |
| | ATTTATGACAGTAGCAAGCTCGCCTCCGGGGTACCCGCAA | CCTCAGGTTCACTACGACTAC |
| | GATTTTCCGGGTCAGGGTCTGGCAGGGACTATACCCTGAC | GCTGGATTTCCCTATTGGGGT |
| | AATCAGCAGTCTGGAACCTGAGGACTTTGCTGTGTATTACT | CAGGGTACACTGGTTACAGTT |
| | GCCAACAGTGGTCTCGCAACCCCCCTACTTTCGGGGGAGG | TCCTCTGGCGGCTCCGAGGGC |
| | TACAAAGGTAGAAATTAAGGAGCCCAAATCTAGCGACAAA | AAGAGCAGCGGCAGCGGCAG |
| | ACTCACACATGTCCACCGTGCCCAGCACCTGAAGCAGCAG | CGAGAGCAAGAGCACCGGCG |
| | GGGGACCGTCAGTCTTCCTCTTCCCCCCAAAACCCAAGGAC | GCAGCGAAATTGTTTTGACCC |
| | ACCCTCATGATCTCCCGGACCCCTGAGGTCACATGCGTGGT | AATCACCTGCCACTCTCTCTGC |
| | GGTGAGCGTGAGCCACGAAGACCCTGAGGTCAAGTTCAA | CTCTCCTGGTGAGCGAGTTAC |
| | CTGGTACGTGGACGGCGTGGAGGTGCATAATGCCAAGAC | TTTGTCATGTAGCGCATCATCA |
| | AAAGCCGCGGGAGGAGCAGTACAACAGCACGTACCGTGT | AGTGTATCTTACATGAACTGG |
| | GGTCAGCGTCCTCACCGTCCTGCACCAGGACTGGCTGAAT | TACCAACAAAAACCCGGACAG |
| | GGCAAGGAGTACAAGTGCAAGGTCTCCAACAAAGCCCTCC | GCACCACGTCGTTGGATTTAT |
| | CAGCCCCCATCGAGAAAACCATCTCCAAAGCCAAAGGGCA | GACAGTAGCAAGCTCGCCTCC |
| | GCCCCGAGAACCACAGGTGTACGTGTACCCCCCATCCCGG | GGGGTACCCGCAAGATTTTCC |
| | GAGGAGATGACCAAGAACCAGGTCAGCCTGACCTGCCTG | GGGTCAGGGTCTGGCAGGGA |
| | GTCAAAGGCTTCTATCCCAGCGACATCGCCGTGGAGTGGG | CTATACCCTGACAATCAGCAG |
| | AGAGCAATGGGCAGCCGGAGAACAACTACAAGACCACGC | TCTGGAACCTGAGGACTTTGC |
| | CTCCCGTGCTGGACTCCGACGGCTCCTTCGCCCTCGTGAGC | TGTGTATTACTGCCAACAGTG |
| | AAGCTCACCGTGGACAAGTCTAGATGGCAGCAGGGGAAC | GTCTCGCAACCCCCCTACTTTC |
| | GTCTTCTCATGCTCCGTGATGCATGAGGCTCTGCACAACCA | GGGGGAGGTACAAAGGTAGA |
| | CTACACGCAGAAGAGCCTCTCCCTGTCTCCGGGT | AATTAAGG |
| | (210) | (211) |
| CD3B2030- | CAAGTTCAGTTGGTTCAATCCGGCGCAGAGGTTAAAAAAC | CAAGTTCAGTTGGTTCAATCC |
| HL-scFv | CCGGATCAAGCGTTAAGGTTAGTTGTAAAGCCTCTGGCTA | GGCGCAGAGGTTAAAAAACCC |
| | CACTTTCACACGCTCAACAATGCATTGGGTTAAGCAGGCCC | GGATCAAGCGTTAAGGTTAGT |
| | CTGGGCAGGGACTGGAGTGGATCGGTTACATAAACCCATC | TGTAAAGCCTCTGGCTACACTT |
| | CAGCGCCTATACAAACTATAACCAGAAGTTCCAAGGGCGG | TCACACGCTCAACAATGCATT |
| | GTTACATTGACCGCTGACAAGTCCACTAGCACAGCATATAT | GGGTTAAGCAGGCCCCTGGGC |
| | GGAGCTGTCAAGTCTGAGATCCGAAGACACTGCCGTATAT | AGGGACTGGAGTGGATCGGT |
| | TATTGCGCTAGTCCACAAGTGCACTATGACTATAACGGTTT | TACATAAACCCATCCAGCGCCT |
| | TCCCTATTGGGGACAAGGAACCCTGGTGACCGTTAGCTCC | ATACAAACTATAACCAGAAGT |
| | GGCGGCTCCGAGGGCAAGAGCAGCGGCAGCGGCAGCGA | TCCAAGGGCGGGTTACATTGA |
| | GAGCAAGAGCACCGGCGGCAGCGAAATTGTCTTGACCCA | CCGCTGACAAGTCCACTAGCA |
| | GTCTCCAGCAACTCTTAGTGCATCACCAGGTGAGCGTGTTA | CAGCATATATGGAGCTGTCAA |
| | CCCTCTCATGTAGCGCCAGCTCATCTGTTAGTTATATGAAT | GTCTGAGATCCGAAGACACTG |
| | TGGTATCAACAGAAACCAGGGCAAGCTCCCAGAAGATGG | CCGTATATTATTGCGCTAGTCC |
| | ATATATGATTCTTCAAAACTCGCAAGTGGTGTCCCAGCCCG | ACAAGTGCACTATGACTATAA |
| | CTTCTCAGGCTCTGGTTCCGGTCGCGATTATACTCTCACCA | CGGTTTTCCCTATTGGGGACA |
| | TCAGTAGTTTGGAACCCGAAGATTTCGCCGTCTATTATTGC | AGGAACCCTGGTGACCGTTAG |
| | CAGCAATGGAGCAGGAATCCCCCCACATTCGGCGGCGGTA | CTCCGGCGGCTCCGAGGGCAA |
| | CAAAGGTTGAGATTAAGGAGCCCAAATCTAGCGACAAAAC | GAGCAGCGGCAGCGGCAGCG |
| | TCACACATGTCCACCGTGCCCAGCACCTGAAGCAGCAGGG | AGAGCAAGAGCACCGGCGGC |
| | GGACCGTCAGTCTTCCTCTTCCCCCCAAAACCCAAGGACAC | AGCGAAATTGTCTTGACCCAG |
| | CCTCATGATCTCCCGGACCCCTGAGGTCACATGCGTGGTG | TCTCCAGCAACTCTTAGTGCAT |
| | GTGAGCGTGAGCCACGAAGACCCTGAGGTCAAGTTCAACT | CACCAGGTGAGCGTGTTACCC |
| | GGTACGTGGACGGCGTGGAGGTGCATAATGCCAAGACAA | TCTCATGTAGCGCCAGCTCATC |
| | AGCCGCGGGAGGAGCAGTACAACAGCACGTACCGTGTGG | TGTTAGTTATATGAATTGGTAT |
| | TCAGCGTCCTCACCGTCCTGCACCAGGACTGGCTGAATGG | CAACAGAAACCAGGGCAAGCT |
| | CAAGGAGTACAAGTGCAAGGTCTCCAACAAAGCCCTCCCA | CCCAGAAGATGGATATATGAT |
| | GCCCCCATCGAGAAAACCATCTCCAAAGCCAAAGGGCAGC | TCTTCAAAACTCGCAAGTGGT |
| | CCCGAGAACCACAGGTGTACGTGTACCCCCCATCCCGGGA | GTCCCAGCCCGCTTCTCAGGCT |
| | GGAGATGACCAAGAACCAGGTCAGCCTGACCTGCCTGGTC | CTGGTTCCGGTCGCGATTATA |
| | AAAGGCTTCTATCCCAGCGACATCGCCGTGGAGTGGGAGA | CTCTCACCATCAGTAGTTTGGA |
| | GCAATGGGCAGCCGGAGAACAACTACAAGACCACGCCTC | ACCCGAAGATTTCGCCGTCTAT |
| | CCGTGCTGGACTCCGACGGCTCCTTCGCCCTCGTGAGCAA | TATTGCCAGCAATGGAGCAGG |
| | GCTCACCGTGGACAAGTCTAGATGGCAGCAGGGGAACGT | AATCCCCCCACATTCGGCGGC |
| | CTTCTCATGCTCCGTGATGCATGAGGCTCTGCACAACCACT | GGTACAAAGGTTGAGATTAAG |
| | ACACGCAGAAGAGCCTCTCCCTGTCTCCGGGT | G |
| | (212) | (213) |
| CD3B2030- | GAGATCGTTCTGACACAGTCTCCCGCAACCCTCAGCGCTTC | GAGATCGTTCTGACACAGTCT |
| N106Q- | ACCCGGTGAGCGTGTCACTCTGAGCTGTTCCGCTAGTAGT | CCCGCAACCCTCAGCGCTTCAC |
| LH-scFv | AGCGTTAGCTACATGAACTGGTATCAACAAAAGCCAGGAC | CCGGTGAGCGTGTCACTCTGA |
| | AGGCACCCAGGCGATGGATTTACGATTCATCAAAACTGGC | GCTGTTCCGCTAGTAGTAGCG |
| | AAGCGGAGTGCCTGCTCGTTTTAGTGGGTCCGGGTCTGGC | TTAGCTACATGAACTGGTATC |
| | CGCGATTACACCCTGACCATATCATCCCTCGAACCTGAGGA | AACAAAAGCCAGGACAGGCA |
| | CTTCGCAGTTTATTATTGCCAACAGTGGAGTAGGAACCCAC | CCCAGGCGATGGATTTACGAT |
| | CTACATTCGGTGGGGGGACCAAAGTCGAGATAAAAGGCG | TCATCAAAACTGGCAAGCGGA |
| | GCTCCGAGGGCAAGAGCAGCGGCAGCGGCAGCGAGAGC | GTGCCTGCTCGTTTTAGTGGG |
| | AAGAGCACCGGCGGCAGCCAGGTACAACTCGTACAGAGC | TCCGGGTCTGGCCGCGATTAC |
| | GGAGCTGAGGTGAAAAAACCCGGTAGTTCCGTTAAGGTTA | ACCCTGACCATATCATCCCTCG |
| | GCTGTAAGGCTAGCGGATACACTTTTACTCGATCTACAATG | AACCTGAGGACTTCGCAGTTT |
| | CACTGGGTTAAACAGGCTCCCGGCCAGGGTTTGGAATGGA | ATTATTGCCAACAGTGGAGTA |
| | TCGGATACATCAACCCCAGTAGTGCCTATACCAATTACAAT | GGAACCCACCTACATTCGGTG |
| | CAAAAGTTTCAAGGCAGAGTGACCCTGACCGCTGACAAAT | GGGGGACCAAAGTCGAGATA |
| | CCACAAGTACCGCATATATGGAGCTCTCAAGTTTGCGAAG | AAAGGCGGCTCCGAGGGCAA |
| | TGAAGATACTGCTGTATATTATTGCGCAAGCCCTCAAGTTC | GAGCAGCGGCAGCGGCAGCG |
| | ACTATGACTATCAAGGGTTTCCTTACTGGGGTCAGGGAAC | AGAGCAAGAGCACCGGCGGC |
| | ACTGGTCACAGTATCATCCGAGCCCAAATCTAGCGACAAA | AGCCAGGTACAACTCGTACAG |
| | ACTCACACATGTCCACCGTGCCCAGCACCTGAAGCAGCAG | AGCGGAGCTGAGGTGAAAAA |
| | GGGGACCGTCAGTCTTCCTCTTCCCCCCAAAACCCAAGGAC | ACCCGGTAGTTCCGTTAAGGT |
| | ACCCTCATGATCTCCCGGACCCCTGAGGTCACATGCGTGGT | TAGCTGTAAGGCTAGCGGATA |
| | GGTGAGCGTGAGCCACGAAGACCCTGAGGTCAAGTTCAA | CACTTTTACTCGATCTACAATG |
| | CTGGTACGTGGACGGCGTGGAGGTGCATAATGCCAAGAC | CACTGGGTTAAACAGGCTCCC |
| | AAAGCCGCGGGAGGAGCAGTACAACAGCACGTACCGTGT | GGCCAGGGTTTGGAATGGATC |
| | GGTCAGCGTCCTCACCGTCCTGCACCAGGACTGGCTGAAT | GGATACATCAACCCCAGTAGT |
| | GGCAAGGAGTACAAGTGCAAGGTCTCCAACAAAGCCCTCC | GCCTATACCAATTACAATCAAA |
| | CAGCCCCCATCGAGAAAACCATCTCCAAAGCCAAAGGGCA | AGTTTCAAGGCAGAGTGACCC |
| | GCCCCGAGAACCACAGGTGTACGTGTACCCCCCATCCCGG | TGACCGCTGACAAATCCACAA |
| | GAGGAGATGACCAAGAACCAGGTCAGCCTGACCTGCCTG | GTACCGCATATATGGAGCTCT |
| | GTCAAAGGCTTCTATCCCAGCGACATCGCCGTGGAGTGGG | CAAGTTTGCGAAGTGAAGATA |
| | AGAGCAATGGGCAGCCGGAGAACAACTACAAGACCACGC | CTGCTGTATATTATTGCGCAAG |
| | CTCCCGTGCTGGACTCCGACGGCTCCTTCGCCCTCGTGAGC | CCCTCAAGTTCACTATGACTAT |
| | AAGCTCACCGTGGACAAGTCTAGATGGCAGCAGGGGAAC | CAAGGGTTTCCTTACTGGGGT |
| | GTCTTCTCATGCTCCGTGATGCATGAGGCTCTGCACAACCA | CAGGGAACACTGGTCACAGTA |
| | CTACACGCAGAAGAGCCTCTCCCTGTCTCCGGGT | TCATCCG |
| | (214) | (215) |
| CD3B2030- | CAGGTACAACTCGTACAGAGCGGAGCTGAGGTGAAAAAA | CAGGTACAACTCGTACAGAGC |
| N106Q- | CCCGGTAGTTCCGTTAAGGTTAGCTGTAAGGCTAGCGGAT | GGAGCTGAGGTGAAAAAACC |
| HL-scFv | ACACTTTTACTCGATCTACAATGCACTGGGTTAAACAGGCT | CGGTAGTTCCGTTAAGGTTAG |
| | CCCGGCCAGGGTTTGGAATGGATCGGATACATCAACCCCA | CTGTAAGGCTAGCGGATACAC |
| | GTAGTGCCTATACCAATTACAATCAAAAGTTTCAAGGCAG | TTTTACTCGATCTACAATGCAC |
| | AGTGACCCTGACCGCTGACAAATCCACAAGTACCGCATAT | TGGGTTAAACAGGCTCCCGGC |
| | ATGGAGCTCTCAAGTTTGCGAAGTGAAGATACTGCTGTAT | CAGGGTTTGGAATGGATCGGA |
| | ATTATTGCGCAAGCCCTCAAGTTCACTATGACTATCAAGGG | TACATCAACCCCAGTAGTGCCT |
| | TTTCCTTACTGGGGTCAGGGAACACTGGTCACAGTATCATC | ATACCAATTACAATCAAAAGTT |
| | CGGCGGCTCCGAGGGCAAGAGCAGCGGCAGCGGCAGCG | TCAAGGCAGAGTGACCCTGAC |
| | AGAGCAAGAGCACCGGCGGCAGCGAGATCGTTCTGACAC | CGCTGACAAATCCACAAGTAC |
| | AGTCTCCCGCAACCCTCAGCGCTTCACCCGGTGAGCGTGTC | CGCATATATGGAGCTCTCAAG |
| | ACTCTGAGCTGTTCCGCTAGTAGTAGCGTTAGCTACATGAA | TTTGCGAAGTGAAGATACTGC |
| | CTGGTATCAACAAAAGCCAGGACAGGCACCCAGGCGATG | TGTATATTATTGCGCAAGCCCT |
| | GATTTACGATTCATCAAAACTGGCAAGCGGAGTGCCTGCT | CAAGTTCACTATGACTATCAA |
| | CGTTTTAGTGGGTCCGGGTCTGGCCGCGATTACACCCTGA | GGGTTTCCTTACTGGGGTCAG |
| | CCATATCATCCCTCGAACCTGAGGACTTCGCAGTTTATTAT | GGAACACTGGTCACAGTATCA |
| | TGCCAACAGTGGAGTAGGAACCCACCTACATTCGGTGGGG | TCCGGCGGCTCCGAGGGCAA |
| | GGACCAAAGTCGAGATAAAAGAGCCCAAATCTAGCGACA | GAGCAGCGGCAGCGGCAGCG |
| | AAACTCACACATGTCCACCGTGCCCAGCACCTGAAGCAGC | AGAGCAAGAGCACCGGCGGC |
| | AGGGGGACCGTCAGTCTTCCTCTTCCCCCCAAAACCCAAG | AGCGAGATCGTTCTGACACAG |
| | GACACCCTCATGATCTCCCGGACCCCTGAGGTCACATGCGT | TCTCCCGCAACCCTCAGCGCTT |
| | GGTGGTGAGCGTGAGCCACGAAGACCCTGAGGTCAAGTT | CACCCGGTGAGCGTGTCACTC |
| | CAACTGGTACGTGGACGGCGTGGAGGTGCATAATGCCAA | TGAGCTGTTCCGCTAGTAGTA |
| | GACAAAGCCGCGGGAGGAGCAGTACAACAGCACGTACCG | GCGTTAGCTACATGAACTGGT |
| | TGTGGTCAGCGTCCTCACCGTCCTGCACCAGGACTGGCTG | ATCAACAAAAGCCAGGACAG |
| | AATGGCAAGGAGTACAAGTGCAAGGTCTCCAACAAAGCC | GCACCCAGGCGATGGATTTAC |
| | CTCCCAGCCCCCATCGAGAAAACCATCTCCAAAGCCAAAG | GATTCATCAAAACTGGCAAGC |
| | GGCAGCCCCGAGAACCACAGGTGTACGTGTACCCCCCATC | GGAGTGCCTGCTCGTTTTAGT |
| | CCGGGAGGAGATGACCAAGAACCAGGTCAGCCTGACCTG | GGGTCCGGGTCTGGCCGCGAT |
| | CCTGGTCAAAGGCTTCTATCCCAGCGACATCGCCGTGGAG | TACACCCTGACCATATCATCCC |
| | TGGGAGAGCAATGGGCAGCCGGAGAACAACTACAAGACC | TCGAACCTGAGGACTTCGCAG |
| | ACGCCTCCCGTGCTGGACTCCGACGGCTCCTTCGCCCTCGT | TTTATTATTGCCAACAGTGGA |
| | GAGCAAGCTCACCGTGGACAAGTCTAGATGGCAGCAGGG | GTAGGAACCCACCTACATTCG |
| | GAACGTCTTCTCATGCTCCGTGATGCATGAGGCTCTGCACA | GTGGGGGGACCAAAGTCGAG |
| | ACCACTACACGCAGAAGAGCCTCTCCCTGTCTCCGGGT | ATAAAAG |
| | (216) | (217) |
| CD3B2029- | CAGGTGCAGCTGGTGCAGAGCGGCGCGGAAGTGAAAAAA | CAGGTGCAGCTGGTGCAGAG |
| N106Q | CCGGGCAGCAGCGTGAAAGTGAGCTGCAAAGCGAGCGGC | CGGCGCGGAAGTGAAAAAAC |
| HL scFv | TATACCTTTACCCGCAGCACCATGCATTGGGTGAAACAGG | CGGGCAGCAGCGTGAAAGTG |
| | CGCCGGGCCAGGGCCTGGAATGGATTGGCTATATTAACCC | AGCTGCAAAGCGAGCGGCTAT |
| | GAGCAGCGCGTATACCAACTATAACCAGAAATTTCAGGGC | ACCTTTACCCGCAGCACCATGC |
| | CGCGTGACCCTGACCGCGGATAAAAGCACCAGCACCGCGT | ATTGGGTGAAACAGGCGCCG |
| | ATATGGAACTGAGCAGCCTGCGCAGCGAAGATACCGCGG | GGCCAGGGCCTGGAATGGATT |
| | TGTATTATTGCGCGAGCCCGCAGGTGCATTATGATTATCA | GGCTATATTAACCCGAGCAGC |
| | GGGCTTTCCGTATTGGGGCCAGGGCACCCTGGTGACCGTG | GCGTATACCAACTATAACCAG |
| | AGCAGCGGCGGCAGCGAAGGCAAAAGCAGCGGCAGCGG | AAATTTCAGGGCCGCGTGACC |
| | CAGCGAAAGCAAAAGCACCGGCGGCAGCGAAATTGTGCT | CTGACCGCGGATAAAAGCACC |
| | GACCCAGAGCCCGGCGACCCTGAGCGCGAGCCCGGGCGA | AGCACCGCGTATATGGAACTG |
| | ACGCGTGACCCTGAGCTGCAGCGCGAGCAGCAGCGTGAG | AGCAGCCTGCGCAGCGAAGAT |
| | CTATATGAACTGGTATCAGCAGAAACCGGGCCAGAGCCCG | ACCGCGGTGTATTATTGCGCG |
| | CGCCGCTGGATTTATGATAGCAGCAAACTGGCGAGCGGC | AGCCCGCAGGTGCATTATGAT |
| | GTGCCGGCGCGCTTTAGCGGCAGCGGCAGCGGCCGCGAT | TATCAGGGCTTTCCGTATTGG |
| | TATACCCTGACCATTAGCAGCCTGGAACCGGAAGATTTTG | GGCCAGGGCACCCTGGTGACC |
| | CGGTGTATTATTGCCAGCAGTGGAGCCGCAACCCGCCGAC | GTGAGCAGCGGCGGCAGCGA |
| | CTTTGGCGGCGGCACCAAAGTGGAAATTAAAGAACCGAA | AGGCAAAAGCAGCGGCAGCG |
| | AAGCAGCGATAAAACCCATACCTGCCCGCCGTGCCCGGCG | GCAGCGAAAGCAAAAGCACC |
| | CCGGAAGCGGCGGGCGGCCCGAGCGTGTTTCTGTTTCCGC | GGCGGCAGCGAAATTGTGCTG |
| | CGAAACCGAAAGATACCCTGATGATTAGCCGCACCCCGGA | ACCCAGAGCCCGGCGACCCTG |
| | AGTGACCTGCGTGGTGGTGAGCGTGAGCCATGAAGATCC | AGCGCGAGCCCGGGCGAACG |
| | GGAAGTGAAATTTAACTGGTATGTGGATGGCGTGGAAGT | CGTGACCCTGAGCTGCAGCGC |
| | GCATAACGCGAAAACCAAACCGCGCGAAGAACAGTATAA | GAGCAGCAGCGTGAGCTATAT |
| | CAGCACCTATCGCGTGGTGAGCGTGCTGACCGTGCTGCAT | GAACTGGTATCAGCAGAAACC |
| | CAGGATTGGCTGAACGGCAAAGAATATAAATGCAAAGTG | GGGCCAGAGCCCGCGCCGCT |
| | AGCAACAAAGCGCTGCCGGCGCCGATTGAAAAAACCATTA | GGATTTATGATAGCAGCAAAC |
| | GCAAAGCGAAAGGCCAGCCGCGCGAACCGCAGGTGTATG | TGGCGAGCGGCGTGCCGGCG |
| | TGTATCCGCCGAGCCGCGAAGAAATGACCAAAAACCAGGT | CGCTTTAGCGGCAGCGGCAGC |
| | GAGCCTGACCTGCCTGGTGAAAGGCTTTTATCCGAGCGAT | GGCCGCGATTATACCCTGACC |
| | ATTGCGGTGGAATGGGAAAGCAACGGCCAGCCGGAAAAC | ATTAGCAGCCTGGAACCGGAA |
| | AACTATAAAACCACCCCGCCGGTGCTGGATAGCGATGGCA | GATTTTGCGGTGTATTATTGCC |
| | GCTTTGCGCTGGTGAGCAAACTGACCGTGGATAAAAGCCG | AGCAGTGGAGCCGCAACCCGC |
| | CTGGCAGCAGGGCAACGTGTTTAGCTGCAGCGTGATGCAT | CGACCTTTGGCGGCGGCACCA |
| | GAAGCGCTGCATAACCATTATACCCAGAAAAGCCTGAGCC | AAGTGGAAATTAAA |
| | TGAGCCCGGGC | (219) |
| | (218) | |

### Engineering of CD3 Fabs for BCMAxCD3 Bispecific Generation

[1031] The CD3 specific VH and VL regions were engineered in VH-CH1-linker-CH2-CH3 and VL-CL formats respectively and expressed as IgG1. The polypeptide of SEQ ID NO: 220 comprising the Fc silencing mutation L234A/L235A/D265S and the CH3 mutation T350V/L351Y/F405A/Y407V designed to promote selective heterodimerization was used to generate the CD3 specific VH-CH1-linker-CH2-CH3 (Table 25).

(huIgG1_G1m(17) _AAS_ZWA)
SEQ ID NO: 220
ASTKGPSVFPLAPSSKSTSGGTAALGCLVKDYFPE
PVTVSWNSGALTSGVHTFPAVLQSSGLYSLSSVVT
VPSSSLGTQTYICNVNHKPSNTKVDKKVEPKSCDK
THTCPPCPAPEAAGGPSVFLFPPKPKDTLMISRTP
EVTCVVVSVSHEDPEVKFNWYVDGVEVHNAKTKPR
EEQYNSTYRVVSVLTVLHQDWLNGKEYKCKVSNKA
LPAPIEKTISKAKGQPREPQVYVYPPSREEMTKNQ
VSLTCLVKGFYPSDIAVEWESNGQPENNYKTTPPV
LDSDGSFALVSKLTVDKSRWQQGNVFSCSVMHEAL
HNHYTQKSLSLSPGK

The polypeptides of SEQ ID NO: 221 or 222 were used to generate the CD3 specific VL-CL (Table 26)

(human kappa light chain)
SEQ ID NO: 221
RTVAAPSVFIFPPSDEQLKSGTASVVCLLNNFYPR
EAKVQWKVDNALQSGNSQESVTEQDSKDSTYSLSS
TLTLSKADYEKHKVYACEVTHQGLSSPVTKSFNRG
EC
(human lambda light chain)
SEQ ID NO: 222
GQPKAAPSVTLFPPSSEELQANKATLVCLISDFYP
GAVTVAWKADSSPVKAGVETTTPSKQSNNKYAASS
YLSLTPEQWKSHRSYSCQVTHEGSTVEKTVAPTEC
S

DNA sequences of anti-CD3 molecules as HC in VH-CH1-liker-CH2-CH3 format and LC in VL-CL format are shown in Table 27.

TABLE 25
Amino acid sequence of the anti-CD3 antibody
arm VH-CH1-linker-CH2-CH3 of the bi-
specific antibody.

| | | SEQ | |
|---|---|---|---|
| HC | | ID | |
| protein | BsAb | NO: | HC amino acid sequence |
| Cris7b | GCDB131 | 223 | QVQLLQSAAEVKKPGESLKI |
| | | | SCKGSGYTFTRSTMHWVRQT |
| | | | PGKGLEWMGYINPSSAYTNY |
| | | | NQKFKDQVTISADKSISTAY |
| | | | LQWSSLKASDTAMYYCARPQ |
| | | | VHYDYNGFPYWGQGTLVTVS |
| | | | SASTKGPSVFPLAPSSKSTS |
| | | | GGTAALGCLVKDYFPEPVTV |
| | | | SWNSGALTSGVHTFPAVLQS |
| | | | SGLYSLSSVVTVPSSSLGTQ |
| | | | TYICNVNHKPSNTKVDKKVE |
| | | | PKSCDKTHTCPPCPAPEAAG |
| | | | GPSVFLFPPKPKDTLMISRT |
| | | | PEVTCVVVSVSHEDPEVKFN |
| | | | WYVDGVEVHNAKTKPREEQY |
| | | | NSTYRVVSVLTVLHQDWLNG |
| | | | KEYKCKVSNKALPAPIEKTI |
| | | | SKAKGQPREPQVYVYPPSRE |
| | | | EMTKNQVSLTCLVKGFYPSD |
| | | | IAVEWESNGQPENNYKTTPP |
| | | | VLDSDGSFALVSKLTVDKSR |
| | | | WQQGNVFSCSVMHEALHNHY |
| | | | TQKSLSLSPG |
| Cris7b- | HC3B127 | 224 | QVQLLQSAAEVKKPGESLKI |
| N106Q | | | SCKGSGYTFTRSTMHWVRQT |
| | | | PGKGLEWMGYINPSSAYTNY |
| | | | NQKFKDQVTISADKSISTAY |
| | | | LQWSSLKASDTAMYYCARPQ |
| | | | VHYDYQGFPYWGQGTLVTVS |
| | | | SASTKGPSVFPLAPSSKSTS |
| | | | GGTAALGCLVKDYFPEPVTV |
| | | | SWNSGALTSGVHTFPAVLQS |
| | | | SGLYSLSSVVTVPSSSLGTQ |
| | | | TYICNVNHKPSNTKVDKKVE |
| | | | PKSCDKTHTCPPCPAPEAAG |
| | | | GPSVFLFPPKPKDTLMISRT |
| | | | PEVTCVVVSVSHEDPEVKFN |
| | | | WYVDGVEVHNAKTKPREEQY |
| | | | NSTYRVVSVLTVLHQDWLNG |
| | | | KEYKCKVSNKALPAPIEKTI |
| | | | SKAKGQPREPQVYVYPPSRE |
| | | | EMTKNQVSLTCLVKGFYPSD |
| | | | IAVEWESNGQPENNYKTTPP |
| | | | VLDSDGSFALVSKLTVDKSR |
| | | | WQQGNVFSCSVMHEALHNHY |
| | | | TQKSLSLSPG |

TABLE 26
Amino acid sequence of the anti-CD3 antibody
light chain arm (VL-CL) of the bi-specific
antibody

| LC | | SEQ | |
|---|---|---|---|
| protein | BsAb | ID NO: | LC amino acid sequence |
| Cris7b | GCDB | 225 | EIVLTQSPSAMSASVGDRVT |
| | 131 | | ITCSASSSVSYMNWYQQKPG |
| | | | KVPKRLIYDSSKLASGVPSR |
| | | | FSGSGSGTEYTLTISSLQPE |
| | | | DFATYYCQQWSRNPPTFGQG |
| | | | TMLEIKRTVAAPSVFIFPPS |
| | | | DEQLKSGTASVVCLLNNFYP |
| | | | REAKVQWKVDNALQSGNSQE |
| | | | SVTEQDSKDSTYSLSSTLTL |
| | | | SKADYEKHKVYACEVTHQGL |
| | | | SSPVTKSFNRGEC |
| Cris7b- | HC3B1 | 226 | EIVLTQSPSAMSASVGDRVT |
| N106Q | 27 | | ITCSASSSVSYMNWYQQKPG |
| | | | KVPKRLIYDSSKLASGVPSR |
| | | | FSGSGSGTEYTLTISSLQPE |
| | | | DFATYYCQQWSRNPPTFGQG |
| | | | TMLEIKRTVAAPSVFIFPPS |
| | | | DEQLKSGTASVVCLLNNFYP |
| | | | REAKVQWKVDNALQSGNSQE |
| | | | SVTEQDSKDSTYSLSSTLTL |
| | | | SKADYEKHKVYACEVTHQGL |
| | | | SSPVTKSFNRGEC |

TABLE 27
cDNA SEQ ID NOs of anti-CD3 ars of bi-specific
antibodies HC in VH-CHl-liker-CH2-
CH3 format and LC in VL-CL format.

| | | HC cDNA | LC cDNA |
|---|---|---|---|
| ID | BsAb | SEQ ID NO: | SEQ ID NO: |
| Cris7b | GCDB131 | caggtgcagctgctg | gaaattgtgctgacc |
| | | cagagcgcggcggaa | cagagcccgagcgcg |
| | | gtgaaaaaaccgggc | atgagcgcgagcgtg |
| | | gaaagcctgaaaatt | ggcgatcgcgtgacc |
| | | agctgcaaaggcagc | attacctgcagcgcg |
| | | ggctatacctttacc | agcagcagcgtgagc |
| | | cgcagcaccatgcat | tatatgaactggtat |
| | | tgggtgcgccagacc | cagcagaaaccgggc |
| | | ccgggcaaaggcctg | aaagtgccgaaacgc |
| | | gaatggatgggctat | ctgatttatgatagc |
| | | attaacccgagcagc | agcaaactggcgagc |
| | | gcgtataccaactat | ggcgtgccgagccgc |
| | | aaccagaaatttaaa | tttagcggcagcggc |
| | | gatcaggtgaccatt | agcggcaccgaatat |
| | | agcgcggataaaagc | accctgaccattagc |
| | | attagcaccgcgtat | agcctgcagccggaa |
| | | ctgcagtggagcagc | gattttgcgacctat |
| | | ctgaaagcgagcgat | tattgccagcagtgg |
| | | accgcgatgtattat | agccgcaacccgccg |
| | | tgcgcgcgcccgcag | acctttggccagggc |
| | | gtgcattatgattat | accatgctggaaatt |
| | | aacggctttccgtat | aaacgtacggtggct |
| | | tggggccagggcacc | gcaccatctgtcttc |
| | | ctggtgaccgtgagc | atcttcccgccatct |
| | | agcgcctccaccaag | gatgagcagttgaaa |
| | | ggcccatcggtcttc | tctggaactgectct |
| | | cccctggcaccctcc | gttgtgtgcctgctg |
| | | tccaagagcacctct | aataacttctatccc |
| | | gggggcacagcggcc | agagaggccaaagta |
| | | ctgggctgcctggtc | cagtggaaggtggat |
| | | aaggactacttcccc | aacgccctccaatcg |
| | | gaaccggtgacggtg | ggtaactcccaggag |
| | | tcgtggaactcaggc | agtgtcacagagcag |
| | | gccctgaccagcggc | gacagcaaggacagc |
| | | gtgcacaccttcccg | acctacagcctcagc |
| | | gctgtcctacagtcc | agcaccctgacgctg |
| | | tcaggactctactcc | agcaaagcagactac |
| | | ctcagcagcgtggtg | gagaaacacaaagtc |
| | | accgtgccctccagc | tacgcctgcgaagtc |
| | | agcttgggcacccag | acccatcagggcctg |
| | | acctacatctgcaac | agctcgcccgtcaca |
| | | gtgaatcacaagccc | aagagcttcaacagg |
| | | agcaacaccaaggtg | ggagagtgt |
| | | gacaagaaagttgag | (228) |
| | | cccaaatcttgtgac | |
| | | aaaactcacacatgt | |
| | | ccaccgtgcccagca | |
| | | cctgaagcagcaggg | |
| | | ggaccgtcagtcttc | |
| | | ctcttccccccaaaa | |
| | | cccaaggacaccctc | |
| | | atgatctcccggacc | |
| | | cctgaggtcacatgc | |
| | | gtggtggtgagcgtg | |
| | | agccacgaagaccct | |
| | | gaggtcaagttcaac | |
| | | tggtacgtggacggc | |
| | | gtggaggtgcataat | |
| | | gccaagacaaagccg | |
| | | cgggaggagcagtac | |
| | | aacagcacgtaccgt | |
| | | gtggtcagcgtcctc | |
| | | accgtcctgcaccag | |
| | | gactggctgaatggc | |
| | | aaggagtacaagtgc | |
| | | aaggtctccaacaaa | |
| | | gccctcccagccccc | |
| | | atcgagaaaaccatc | |
| | | tccaaagccaaaggg | |
| | | cagccccgagaacca | |
| | | caggtgtacgtgtac | |
| | | cccccatcccgggag | |
| | | gagatgaccaagaac | |
| | | caggtcagcctgacc | |
| | | tgcctggtcaaaggc | |
| | | ttctatcccagcgac | |
| | | atcgccgtggagtgg | |
| | | gagagcaatgggcag | |
| | | ccggagaacaactac | |
| | | aagaccacgcctccc | |
| | | gtgctggactccgac | |
| | | ggctccttcgccctc | |
| | | gtgagcaagctcacc | |
| | | gtggacaagtctaga | |
| | | tggcagcaggggaac | |
| | | gtcttctcatgctcc | |
| | | gtgatgcatgaggct | |
| | | ctgcacaaccactac | |
| | | acgcagaagagcctc | |
| | | tccctgtctccgggt | |
| | | (227) | |
| Cris7b- | HC3B127 | caagtgcaactcctt | gaaattgtgctgacc |
| N106Q | | cagtcagccgccgag | cagagcccgagcgcg |
| | | gttaaaaaaccagga | atgagcgcgagcgtg |
| | | gaatcactgaaaatc | ggcgatcgcgtgacc |
| | | tcctgtaagggtagc | attacctgcagcgcg |
| | | ggatataccttcact | agcagcagcgtgagc |
| | | agatcaaccatgcat | tatatgaactggtat |
| | | tgggtgagacagact | cagcagaaaccgggc |
| | | ccaggtaaaggattg | aaagtgccgaaacgc |
| | | gagtggatgggatac | ctgatttatgatagc |
| | | ataaacccctcctca | agcaaactggcgagc |
| | | gcctataccaattac | ggcgtgccgagccgc |
| | | aatcaaaaatttaag | tttagcggcagcggc |
| | | gatcaagtgactatc | agcggcaccgaatat |
| | | agtgctgacaagagc | accctgaccattagc |
| | | atctcaaccgcctac | agcctgcagccggaa |
| | | cttcagtggtcatca | gattttgcgacctat |
| | | ctgaaagcatcagat | tattgccagcagtgg |
| | | acagccatgtattac | agccgcaacccgccg |
| | | tgtgcaagaccccaa | acctttggccagggc |
| | | gttcactatgactat | accatgctggaaatt |
| | | cagggtttcccatac | aaacgtacggtggct |
| | | tgggggcaaggaaca | gcaccatctgtcttc |
| | | ctcgtgaccgtttca | atcttcccgccatct |
| | | tctgcctccaccaag | gatgagcagttgaaa |
| | | ggcccatcggtcttc | tctggaactgectct |
| | | cccctggcaccctcc | gttgtgtgcctgctg |
| | | tccaagagcacctct | aataacttctatccc |
| | | gggggcacagcggcc | agagaggccaaagta |
| | | ctgggctgcctggtc | cagtggaaggtggat |
| | | aaggactacttcccc | aacgccctccaatcg |
| | | gaaccggtgacggtg | ggtaactcccaggag |
| | | tcgtggaactcaggc | agtgtcacagagcag |
| | | gccctgaccagcggc | gacagcaaggacagc |
| | | gtgcacaccttcccg | acctacagcctcagc |
| | | gctgtcctacagtcc | agcaccctgacgctg |
| | | tcaggactctactcc | agcaaagcagactac |
| | | ctcagcagcgtggtg | gagaaacacaaagtc |
| | | accgtgccctccagc | tacgcctgcgaagtc |
| | | agcttgggcacccag | acccatcagggcctg |
| | | acctacatctgcaac | agctcgcccgtcaca |
| | | gtgaatcacaagccc | aagagcttcaacagg |
| | | agcaacaccaaggtg | ggagagtgt |
| | | gacaagaaagttgag | (228) |
| | | cccaaatcttgtgac | |
| | | aaaactcacacatgt | |
| | | ccaccgtgcccagca | |
| | | cctgaagcagcaggg | |
| | | ggaccgtcagtcttc | |
| | | ctcttccccccaaaa | |
| | | cccaaggacaccctc | |
| | | atgatctcccggacc | |
| | | cctgaggtcacatgc | |
| | | gtggtggtgagcgtg | |
| | | agccacgaagaccct | |
| | | gaggtcaagttcaac | |
| | | tggtacgtggacggc | |
| | | gtggaggtgcataat | |
| | | gccaagacaaagccg | |
| | | cgggaggagcagtac | |
| | | aacagcacgtaccgt | |
| | | gtggtcagcgtcctc | |
| | | accgtcctgcaccag | |
| | | gactggctgaatggc | |
| | | aaggagtacaagtgc | |
| | | aaggtctccaacaaa | |
| | | gccctcccagccccc | |
| | | atcgagaaaaccatc | |
| | | tccaaagccaaaggg | |
| | | cagccccgagaacca | |
| | | caggtgtacgtgtac | |
| | | cccccatcccgggag | |
| | | gagatgaccaagaac | |
| | | caggtcagcctgacc | |
| | | tgcctggtcaaaggc | |
| | | ttctatcccagcgac | |
| | | atcgccgtggagtgg | |
| | | gagagcaatgggcag | |
| | | ccggagaacaactac | |
| | | aagaccacgcctccc | |
| | | gtgctggactccgac | |
| | | ggctccttcgccctc | |
| | | gtgagcaagctcacc | |
| | | gtggacaagtctaga | |
| | | tggcagcaggggaac | |
| | | gtcttctcatgctcc | |
| | | gtgatgcatgaggct | |
| | | ctgcacaaccactac | |
| | | acgcagaagagcctc | |
| | | tccctgtctccgggt | |
| | | (229) | |

### Engineering of BCMA Fab-Fc for BCMAxCD3 Bispecific Generation

[1032] The BCMA specific VH and VL regions were engineered in VH-CH1-linker-CH2-CH3 and VL-CL formats respectively. The polypeptide of SEQ ID NO: 230 comprising the Fc silencing mutation L234A/L235A/D265S and the CH3 mutation T350V/T366L/K392L/T394W designed to promote selective heterodimerization was used to generate the CD3 specific VH-CH1-linker-CH2-CH3).

(huIgG1_G1m(17)_AAS_ZWB)
SEQ ID NO: 230
ASTKGPSVFPLAPSSKSTSGGTAALGCLVKDYFPE
PVTVSWNSGALTSGVHTFPAVLQSSGLYSLSSVVT
VPSSSLGTQTYICNVNHKPSNTKVDKKVEPKSCDK
THTCPPCPAPEAAGGPSVFLFPPKPKDTLMISRTP
EVTCVVVSVSHEDPEVKFNWYVDGVEVHNAKTKPR
EEQYNSTYRVVSVLTVLHQDWLNGKEYKCKVSNKA
LPAPIEKTISKAKGQPREPQVYVLPPSREEMTKNQ
VSLLCLVKGFYPSDIAVEWESNGQPENNYLTWPPV
LDSDGSFFLYSKLTVDKSRWQQGNVFSCSVMHEAL
HNHYTQKSLSLSPGK

The polypeptides of SEQ ID NO: 231 or 232 were used to generate the BCMA specific VL-CL.

(human kappa light chain)
SEQ ID NO: 231
RTVAAPSVFIFPPSDEQLKSGTASVVCLLNNFYPR
EAKVQWKVDNALQSGNSQESVTEQDSKDSTYSLSS
TLTLSKADYEKHKVYACEVTHQGLSSPVTKSFNRG
EC
(human lambda light chain)
SEQ ID NO: 232
GQPKAAPSVTLFPPSSEELQANKATLVCLISDFYP
GAVTVAWKADSSPVKAGVETTTPSKQSNNKYAASS
YLSLTPEQWKSHRSYSCQVTHEGSTVEKTVAPTEC
S

The amino acid sequences of BCMA Fab-Fc heavy chain (HC) and light chains (LCs) are shown below.

BCMA Fab-Fc heavy chain
(SEQ ID NO: 233)
EVQLLESGGGLVQPGGSLRLSCAASGFTFSSYAMS
WVRQAPGKGLEWVSAISGSGGSTYYADSVKGRFTI
SRDNSKNTLYLQMNSLRAEDTAVYYCAKDEGYSSG
HYYGMDVWGQGTTVTVSSASTKGPSVFPLAPSSKS
TSGGTAALGCLVKDYFPEPVTVSWNSGALTSGVHT
FPAVLQSSGLYSLSSVVTVPSSSLGTQTYICNVNH
KPSNTKVDKKVEPKSCDKTHTCPPCPAPEAAGGPS
VFLFPPKPKDTLMISRTPEVTCVVVSVSHEDPEVK
FNWYVDGVEVHNAKTKPREEQYNSTYRVVSVLTVL
HQDWLNGKEYKCKVSNKALPAPIEKTISKAKGQPR
EPQVYVLPPSREEMTKNQVSLLCLVKGFYPSDIAV
EWESNGQPENNYLTWPPVLDSDGSFFLYSKLTVDK
SRWQQGNVFSCSVMHEALHNHYTQKSLSLSPG
BCMA Fab-Fc light chain
(SEQ ID NO: 234)
EIVLTQSPGTLSLSPGERATLSCRASQSISSSFLT
WYQQKPGQAPRLLIYGASSRATGIPDRFSGGGSGT
DFTLTISRLEPEDFAVYYCQHYGSSPMYTFGQGTK
LEIKRTVAAPSVFIFPPSDEQLKSGTASVVCLLNN
FYPREAKVQWKVDNALQSGNSQESVTEQDSKDSTY
SLSSTLTLSKADYEKHKVYACEVTHQGLSSPVTKS
FNRGEC

Engineering of BCMA scFvs-Fc for BCMA×CD3 Bispecific Generation

[1033] BCMA VH/VL regions engineered as scFvs in either VH-Linker-VL or VL-linker-VH orientations using the linker of SEQ ID NO: 3 (Table 2), as described in Example 2, were further engineered into a scFv-hinge-CH2-CH3 format comprising the Fc silencing mutation (L234A/L235A/D265S) and the T350V/T366L/K392L/T394W mutations designed to promote selective heterodimerization and expressed as IgG1 (Table 28). The polypeptide of SEQ ID NO: 235 was used as the constant domain hinge-CH2-CH3 (Fc).

SEQ ID NO: 235
(huIgG1_G1m(17)-hinge-Fc_C220S_AAS_ZWB)
EPKSSDKTHTCPPCPAPEAAGGPSVFLFPPKPKDT
LMISRTPEVTCVVVSVSHEDPEVKFNWYVDGVEVH
NAKTKPREEQYNSTYRVVSVLTVLHQDWLNGKEYK
CKVSNKALPAPIEKTISKAKGQPREPQVYVLPPSR
EEMTKNQVSLLCLVKGFYPSDIAVEWESNGQPENN
YLTWPPVLDSDGSFFLYSKLTVDKSRWQQGNVFSC
SVMHEALHNHYTQKSLSLSPG

TABLE 28
Amino acid sequences of anti- BCMA scFvs-Fc
for BCMAxCD3 bispecific generation

| Protein | SEQ ID NO: | Amino acid sequence |
|---|---|---|
| BCMB519-LH-scFv | 236 | EVQLLESGGGLVQPGGSLRL |
| | | SCAASGFTFSSYAMSWVRQA |
| | | PGKGLEWVSAISGSGGSTYY |
| | | ADSVKGRFTISRDNSKNTLY |
| | | LQMNSLRAEDTAVYYCAKDE |
| | | GYSSGHYYGMDVWGQGTTVT |
| | | VSSASTKGPSVFPLAPSSKS |
| | | TSGGTAALGCLVKDYFPEPV |
| | | TVSWNSGALTSGVHTFPAVL |
| | | QSSGLYSLSSVVTVPSSSLG |
| | | TQTYICNVNHKPSNTKVDKK |
| | | VEPKSCDKTHTCPPCPAPEA |
| | | AGGPSVFLFPPKPKDTLMIS |
| | | RTPEVTCVVVSVSHEDPEVK |
| | | FNWYVDGVEVHNAKTKPREE |
| | | QYNSTYRVVSVLTVLHQDWL |
| | | NGKEYKCKVSNKALPAPIEK |
| | | TISKAKGQPREPQVYVLPPS |
| | | REEMTKNQVSLLCLVKGFYP |
| | | SDIAVEWESNGQPENNYLTW |
| | | PPVLDSDGSFFLYSKLTVDK |
| | | SRWQQGNVFSCSVMHEALHN |
| | | HYTQKSLSLSPG |

[1034] The bsAbs were assayed for thermal stability, abilities to bind T cells, and cytotoxicity.

### Thermal Stability Analysis

[1035] For thermal stability, Thermal unfolding and aggregation were measured from 20° C.-95° C. using a ramp of 1° C./min on a NanoTemper PromethiusNT.48 instrument. Samples were then transferred into nanoDSF capillary by capillary action and assayed in duplicate (Table 2). All variants (except for BC3B126) had similar Tonset, Tm1, and Tagg, indicating that neither the specific back-mutations nor the identity of the mutation at VH N106 had a significant impact on thermostability. On average the bsAbs had Tonset, Tm1, and Tagg of 61, 68, and 77° C., where Tm1 represented the melting temperature of the scFv moiety, suggesting that all the Cris-7 variants could be amenable to therapeutic development.

TABLE Ther
mostability analysis of bsAbs containing Cris-7 scFv moieties.

| | Tm/Tagg | | |
|---|---|---|---|
| Protein Batch Name | Tonset | Tml | Tagg |
| BC3B51.001 | 61.8° C. | 69.1° C. | 77.7° C. |
| BC3B109.001 | 61.0° C. | 68.3° C. | 76.3° C. |
| BC3B114.001 | 61.1° C. | 68.4° C. | 78.2° C. |
| BC3B53.001 | 61.4° C. | 68.9° C. | 79.2° C. |
| BC3B123.001 | 62.0° C. | 68.8° C. | 76.8° C. |
| BC3B128.001 | 60.7° C. | 68.7° C. | 77.5° C. |
| BC3B103.001 | 61.4° C. | 68.8° C. | 78.2° C. |
| BC3B107.001 | 61.4° C. | 68.2° C. | 77.6° C. |
| BC3B112.001 | NA | NA | NA |
| BC3B117.001 | 61.4° C. | 69.1° C. | 77.7° C. |
| BC3B121.001 | 61.7° C. | 68.3° C. | 76.6° C. |
| BC3B126.001 | 51.1° C. | 68.1° C. | 76.5° C. |
| BC3B104.001 | 60.5° C. | 69.0° C. | 76.5° C. |
| BC3B108.001 | 61.4° C. | 68.1° C. | 77.7° C. |
| BC3B113.001 | 61.1° C. | 68.2° C. | 77.2° C. |
| BC3B118.001 | 62.0° C. | 69.2° C. | 77.3° C. |
| BC3B122.001 | 61.3° C. | 68.5° C. | 76.3° C. |
| BC3B127.001 | 61.4° C. | 68.6° C. | 75.9° C. |
| BC3B105.001 | 61.8° C. | 69.3° C. | 77.9° C. |
| BC3B110.001 | 61.7° C. | 68.0° C. | 77.3° C. |
| BC3B115.001 | 61.0° C. | 68.8° C. | 76.5° C. |
| BC3B119.001 | 61.7° C. | 69.6° C. | 77.8° C. |
| BC3B124.001 | NA | NA | NA |
| BC3B129.001 | 61.4° C. | 69.3° C. | 77.2° C. |

### Activity Analysis

[1036] The BCMAxCD3 bi-specifics (BsAbs) were tested for their abilities to either bind T cells or to induce T cell-based cytotoxicity against cells expressing each antigen (Tables 29 and 30). Binding and cytotoxicity assays are described below.

[1037] The bsAbs were assayed for their abilities bind T cells and to induce T-cell mediated cytotoxicity against H929 cells (ATCC® CRL-9068™). For T cell binding, briefly, bsAbs were prepared at 2× concentration of 600 nM in assay media (RPMI 1640+10% HI-FBS) and diluted in 3-fold serial dilutions in sterile polypropylene (PP) greiner plates in stain buffer for a 11-point titration. Stain buffer with no antibody was added to bottom 4 wells and assign as background control (secondary antibody alone). Parental Cris7b, CD3B695 (bivalent mAb controls) and CD3B375 (bsAb which was monovalent for Cris-7b) were added also with full dose-response curves.

[1038] Frozen T-cells were thawed in a 37° C. water bath and transferred gently into conical tube containing warm 5 mL media (RPMI+10% FBS)/1 vial of 1×10⁶ cells. Cells were mixed and centrifuged for 5 minutes at 400×g followed by resuspension in flow staining buffer, and counted and viability checked. Cells were then plated in 50 uL/50,000 cells/well into assay plates. Assay positive control mAb was added in the first column in quadruplicates at 2× at 20 nM in the bottom 4 wells. Stain buffer with no mAb was added to the top 4 wells and assigned as background controls (secondary antibody alone). Serially diluted antibody samples were added at 50 uL/well using Intergra Viaflo according to the attached plate maps and incubated for 1 hr at 37° C. After one hour incubation, 150 uL staining buffer were added to all wells, and cells were spun at 500×g for 5 minutes to pellet cells. Cells were then washed prior to addition of Alexa Fluor 647 (A647) conjugated anti human IgG Fc specific secondary detection antibody at 2 ug/mL in staining buffer. Secondary detection antibody was added at 50 uL/well to the washed cells. Plates were covered with foil and incubated for 30 minutes on ice or in the fridge. 150 uL staining buffer were added to all wells, and cells were spun at 500×g for 5 min to pellet cells. Cells were resuspended in 20 uL running buffer containing 1:1000 dilution of SYTOX™ green dead cell stain and run plates on iQue® Screener flow cytometer (Essen BioScience, Inc.). Briefly, cells were gated on FCS vs. SCS dot plot to eliminate debris. Singlets were gated on SCS-A vs SCS-H dot plot and from singlet population, live cells gated choosing BL1 channel for low/negative with SYTOX™ green viability stain (Thermo Fisher). Cell binding of control mAbs or test panel supernatants was assessed by comparing to negative/isotype control binding by RL1 (A647) Geomeans from the live cell population.

### Antibody Sample Preparation

[1039] BsAbs were prepared at 20 nM in assay media and serially diluted 3-fold for an 11-point titration in assay media and stored at 4 C.

[1040] Target cells (H929, ATCC® CRL-9068™) were prepared by addition of Fc block at 5 uL/1×10⁶ cells (50 uL per 10 million cells), and incubated at room temperature for 20 minutes at 37° C. Cells were diluted to 4×10⁵ cells/ml for plating. Control wells were supplemented with 50 uL of media/well and incubated at 37° C. T cell vials were thawed in at 37° C. into a 50 mL conical tube containing room temperature assay media (5 mL media/1 vial of cells). Cells were spun at 300×g for 5 min, and resuspended in 10 mL fresh media and counted. For E:T ratio of 5:1, a T-cell suspension at 2×10\hat{ }6/mL was prepared. Cells were prepared at 50 uL/100 k/well to the assay plates already containing tumor target cells (from step above) according to the plate map. Control wells were supplemented with 50 uL of media/well and incubated at 37° C.

[1041] Antibodies were added at 100 uL/well and serially diluted starting from 10 nM to the assay plates containing mixed tumor target cells and T-cells. Target cells were at 20,000 cells/well and pan T-cells cell counts at 100,000 cells/well. Total assay volume was 200 uL/well. Plates were incubated at 37° C., 5% CO2 in a humidified cell culture incubator for 48 hr.

[1042] Cells were washed by adding 150 uL of BD staining buffer and spun at 300×g for 5 min. Staining solution mixture in BD stain buffer contained:

[1043] APC-conjugated anti-Human CD4 (1:100) (R&D Systems FAB3791A-025)

[1044] APC-conjugated anti-Human CD8 (1:100) (R&D Systems FAB1509A-025)

[1045] Brilliant Violet 421™-conjugated anti-Human CD25 (1:500)

[1046] Vybrant™ DyeCycle™ Green Stain (Invitrogen) at 1:12500 dilution were prepared separately and added at 50 uL/well staining solution mixture to all wells of assay plates. 25 uL/well of diluted vibrant green dye were added to top 2 wells of 1st control column of all assay plates followed by incubation at room temperature for 20 min. Plates were washed 2× with 150 uL staining buffer and resuspended in 30 uL IntelliCyt® running buffer containing SYTOX™ green live/dead stain (1:1000) and analyzed using the iQue® PLUS Screener within 4 hr.

[1047] Cells were gated on FSC-H vs SSC-H, and T-cell and tumor cell populations were gated from all cells on on APC (RL1) vs SSC-H. Live cells and dead cells (live/dead stain) were gated for both tumor and T cells from their respective dot plots on FSC-H vs Sytox Green (BL2). Using live T-cells, activated/CD25 positive T cell populations were gated on FSC-H vs Brilliant Violet (VL1). Cell populations were determined as follows:

Dead tumor cells=SytoxGreen live-dead stain positive/total tumor cells×100

% Live T-cells=L/D negative T-cells/total T-cells×100

% Activated T-cells=CD25 positive Live T-cells/Live T-cells×100

[1048] Cell binding analysis showed that the Cris-7 variants displayed a range of affinity for T cells, and this cell-based affinity was correlated to the EC50 for cytotoxicity (Table 29). In general, variants of the Cris-7 v-region formatted in heavy-light orientation as scFv displayed ˜10-fold tighter than in the LH orientation binding to cells, consistent with ELISA data. The nature of the mutations to eliminate the risk of N106-based deamidation had a significant effect on T cell binding and on cytotoxicity. Altogether, the three different sets of back mutations, (defined by CD3B2030, CD3B2051, and CD3B2089) combined with mutation of N106Q/A/G/S resulted in a panel of Cris-7 variants with EC50 for T cell binding ranging from 3 to ˜300 nM, and correlated with EC50 for cytotoxicity from 0.012 to 3.5 nM. For T cell-redirecting bsAbs (bsTCE), weaker affinity T cell redirection, relative to the affinity for tumor targeting can allow design of the antibody to maximize efficacy while minimizing toxicity associated with aberrant T cell activation, accumulation in secondary lymphoid organs, and cytokine-release-related toxicity. Additionally Cris-7-derived scFvs in the “LH” orientation had weaker binding to T cells, compared to HL orientation. Thus, this panel was considered advantageous—and thus we selected a subset of the Cris-7 variants to display a range of binding affinity to use in lead bsTCE.

TABLE 29
T cell binding and cytotoxicity analysis of Cris-7 × BCMA
bsAbs using H929 cells.

| | | | H929 | |
|---|---|---|---|---|
| | | Binding, | Killing | T cell |
| | | EC50, | EC50, | activation, |
| | Cris7 Variant | nM | pM | % CD25 |
| BC3B102.001 | B2030 HL | 3 | NA | NA |
| BC3B106.001 | B2051 HL | 6.8 | NA | NA |
| BC3B111.001 | B2089 HL | 6.4 | NA | NA |
| BC3B116.001 | B2030 LH | 21.8 | NA | NA |
| BC3B120.001 | B2051 LH | 100.4 | NA | NA |
| BC3B125.001 | B2089 LH | 36.9 | NA | NA |
| BC3B51.001 | B2030 HL NtoQ | 1.9 | 12.9 | 23.4953116 |
| BC3B109.001 | B2051 HL NtoQ | 13.8 | 42.6 | 110.55834 |
| BC3B114.001 | B2089 HL NtoQ | 3.2 | 12.6 | 24.7547018 |
| BC3B53.001 | B2030 LH NtoQ | 19.6 | 27.8 | 56.6770832 |
| BC3B123.001 | B2051 LH NtoQ | 65 | 69.0 | 129.712199 |
| BC3B128.001 | B2089 LH NtoQ | 42.9 | 35.4 | 81.8260112 |
| BC3B103.001 | B2030 HL NtoA | 4.6 | 92.1 | 153.584034 |
| BC3B107.001 | B2051 HL NtoA | 8.6 | 41.5 | 90.2349376 |
| BC3B112.001 | B2089 HL NtoA | 300 | NA | NA |
| BC3B117.001 | B2030 LH NtoA | 60.9 | 148.6 | 279.030715 |
| BC3B121.001 | B2051 LH NtoA | 73.3 | 100.2 | 192.322866 |
| BC3B126.001 | B2089 LH NtoA | 177.3 | 182.0 | 339.169276 |
| BC3B104.001 | B2030 HL NtoG | 64.2 | 236.6 | 448.804965 |
| BC3B108.001 | B2051 HL NtoG | 11 | 85.3 | 192.696137 |
| BC3B113.001 | B2089 HL NtoG | 11.1 | 44.3 | 94.2622022 |
| BC3B118.001 | B2030 LH NtoG | 256.7 | 745.1 | 870.792549 |
| BC3B122.001 | B2051 LH NtoG | 300 | 4360.5 | 6136.07165 |
| BC3B127.001 | B2089 LH NtoG | 300 | 805.9 | 1063.42224 |
| BC3B105.001 | B2030 HL NtoS | 20.7 | 172.2 | 272.296713 |
| BC3B110.001 | B2051 HL NtoS | 31.2 | 780.5 | 1662.96965 |
| BC3B115.001 | B2089 HL NtoS | 24 | 155.2 | 323.251509 |
| BC3B119.001 | B2030 LH NtoS | 300 | 10000.0 | 9999.99994 |
| BC3B124.001 | B2051 LH NtoS | 300 | NA | NA |
| BC3B129.001 | B2089 LH NtoS | 300 | 10000.0 | 9999.99994 |

TABLE 30
Functional activity of the bi-specific proteins.

| | | | EC₅₀, |
|---|---|---|---|
| | | | Cytotoxicity |
| Name | BsAb | Description | (M) |
| Cris7b | GCDB131 | HC1 (ZWA): N-Terminal | 3.3364E−11 |
| | | Cris7b-Fab; HC2 (ZWB): N- | |
| | | Terminal BCMB519-LH-scFv | |
| Cris7- | BC3B51 | HC1 (ZWA): CD3B2030NtoQ | 2.7847E−11 |
| CD3B2030- | | HL scFv; HC2 (ZWB): | |
| VH-N1060 | | BCMB519 Fab | |
| Cris7- | BC3B53 | HC1 (ZWA): CD3B2030NtoQ | 2.7847E−11 |
| CD3B2030- | | LH scFv; HC2 (ZWB): | |
| VH-N1060 | | BCMB519 Fab | |
| Cris7- | BC3B103 | HC1 (ZWA): CD3B2030NtoA | 9.213E−11 |
| CD3B2030- | | HL scFv; HC2 (ZWB): | |
| VH-N106A | | BCMB519 Fab | |
| Cris7- | BC3B117 | HC1 (ZWA): CD3B2030NtoA | 1.4858E−10 |
| CD3B2030- | | LH scFv; HC2 (ZWB): | |
| VH-N106A | | BCMB519 Fab | |
| Cris7- | BC3B104 | HC1 (ZWA): CD3B2030NtoG | 2.3659E−10 |
| CD3B2030- | | HL scFv; HC2 (ZWB): | |
| VH-N106G | | BCMB519 Fab | |
| Cris7- | BC3B118 | HC1 (ZWA): CD3B2030NtoG | 7.4505E−10 |
| CD3B2030- | | LH scFv; HC2 (ZWB): | |
| VH-N106G | | BCMB519 Fab | |
| Cris7- | BC3B105 | HC1 (ZWA): CD3B2030NtoS | 1.7224E−10 |
| CD3B2030- | | HL scFv; HC2 (ZWB): | |
| VH-N106S | | BCMB519 Fab | |
| Cris7- | BC3B119 | HC1 (ZWA): CD3B2030NtoS | 1E−08 |
| CD3B2030- | | LH scFv; HC2 (ZWB): | |
| VH-N106S | | BCMB519 Fab | |
| Cris7- | BC3B109 | HC1 (ZWA): CD3B2051NtoQ | 4.2561E−11 |
| CD3B2051- | | HL scFv; HC2 (ZWB): | |
| VH-N1060 | | BCMB519 Fab | |
| Cris7- | BC3B123 | HC1 (ZWA): CD3B2051NtoQ | 6.9003E−11 |
| CD3B2051- | | LH scFv; HC2 (ZWB): | |
| VH-N1060 | | BCMB519 Fab | |
| Cris7- | BC3B107 | HC1 (ZWA): CD3B2051NtoA | 4.1534E−11 |
| CD3B2051- | | HL scFv; HC2 (ZWB): | |
| VH-N106A | | BCMB519 Fab | |
| Cris7- | BC3B121 | HC1 (ZWA): CD3B2051NtoA | 1.0015E−10 |
| CD3B2051- | | LH scFv; HC2 (ZWB): | |
| VH-N106A | | BCMB519 Fab | |
| Cris7- | BC3B108 | HC1 (ZWA): CD3B2051NtoG | 8.5329E−11 |
| CD3B2051- | | HL scFv; HC2 (ZWB): | |
| VH-N106G | | BCMB519 Fab | |
| Cris7- | BC3B122 | HC1 (ZWA): CD3B2051NtoG | 4.3605E−09 |
| CD3B2051- | | LH scFv; HC2 (ZWB): | |
| VH-N106G | | BCMB519 Fab | |
| Cris7- | BC3B110 | HC1 (ZWA): CD3B2051NtoS | 7.8052E−10 |
| CD3B2051- | | HL scFv; HC2 (ZWB): | |
| VH-N106S | | BCMB519 Fab | |
| Cris7- | BC3B114 | HC1 (ZWA): CD3B2089NtoQ | 1.255E−11 |
| CD3B2089- | | HL scFv; HC2 (ZWB): | |
| VH-N1060 | | BCMB519 Fab | |
| Cris7- | BC3B128 | HC1 (ZWA): CD3B2089NtoQ | 3.5408E−11 |
| CD3B2089- | | LH scFv; HC2 (ZWB): | |
| VH-N1060 | | BCMB519 Fab | |
| Cris7- | BC3B126 | HC1 (ZWA): CD3B2089NtoA | 1.8201E−10 |
| CD3B2089- | | LH scFv; HC2 (ZWB): | |
| VH-N106A | | BCMB519 Fab | |
| Cris7- | BC3B113 | HC1 (ZWA): CD3B2089NtoG | 4.4345E−11 |
| CD3B2089- | | HL scFv; HC2 (ZWB): | |
| VH-N106G | | BCMB519 Fab | |
| Cris7- | BC3B127 | HC1 (ZWA): CD3B2089NtoG | 8.059E−10 |
| CD3B2089- | | LH scFv; HC2 (ZWB): | |
| VH-N106G | | BCMB519 Fab | |
| Cris7- | BC3B115 | HC1 (ZWA): CD3B2089NtoS | 1.5516E−10 |
| CD3B2089- | | HL scFv; HC2 (ZWB): | |
| VH-N106S | | BCMB519 Fab | |
| Cris7- | BC3B129 | HC1 (ZWA): CD3B2089NtoS | N.D. |
| CD3B2089- | | LH scFv; HC2 (ZWB): | |
| VH-N106S | | BCMB519 Fab | |

### Example 3: Expression and Purification of Bispecific CD79b×CD3 and Trispecific CD79b×CD20×CD3 Antibodies

[1049] The CD79b×CD3 bispecific antibody (bsAb) is an immunoglobulin (Ig) G1 bispecific antibody that can bind simultaneously or individually to the cluster of differentiation (CD) 3 receptor complex on T lymphocytes and to CD79b on B lymphocytes. The CD79b×CD20×CD3 trispecific antibody is an immunoglobulin (Ig) G1 trispecific antibody that can bind simultaneously or individually to the CD3 receptor complex on T lymphocytes, and to the CD20 receptor complex on B lymphocytes and to the CD79b receptor complex on B lymphocytes. The antibody has mutations which reduce Fc binding to a Fcγ receptor and heterodimerization has been enhanced using the knobs-in-holes platform mutations. The trispecific antibody was developed to evaluate the therapeutic potential of dual targeting CD20 and CD79b for T cell redirection. An illustration of an exemplary CD79b×CD20×CD3 antibody is depicted in FIG. 6.

[1050] Table 31 provides a summary of examples of some CD79b×CD20×CD3 trispecific antibodies described herein:

TABLE 31
Exemplary CD79b × CD20 × CD3 Trispecific antibodies

| | | HC1 | | LC | | | HC2 | |
|---|---|---|---|---|---|---|---|---|
| | | Amino | HC1 | Amino | | | Amino | HC2 |
| | | acid | DNA | acid | LC DNA | | acid | DNA |
| | HC1/LC | sequence | sequence | sequence | sequence | | sequence | sequence |
| | (CD79b | SEQ ID | SEQ ID | SEQ ID | SEQ ID | HC2 (CD3- | SEQ ID | SEQ ID |
| ID | arm) | NO | NO | NO | NO | CD20 arm) | NO | NO |
| C923B38 | CD9B374 | 1489 | 1490 | 1491 | 1492 | CD3B2030- | 1463 | 1464 |
| | | | | | | N106A- | | |
| | | | | | | scFv-LH- | | |
| | | | | | | C20B22 | | |
| C923B74 | CD9B330- | 1493 | 1494 | 1495 | 1496 | CD3B2030- | 1463 | 1464 |
| | N31S | | | | | N106A- | | |
| | | | | | | scFv-LH- | | |
| | | | | | | C20B22 | | |
| C923B99 | CD9B643 | 1497 | 1498 | 1499 | 1500 | CD3B2030- | 1463 | 1464 |
| | | | | | | N106A- | | |
| | | | | | | scFv-LH- | | |
| | | | | | | C20B22 | | |
| C923B36 | CD9B374 | 1489 | 1490 | 1491 | 1492 | CD3B2089- | 1465 | 1466 |
| | | | | | | N106G- | | |
| | | | | | | scFv-LH- | | |
| | | | | | | C20B22 | | |
| C923B73 | CD9B330- | 1493 | 1494 | 1495 | 1496 | CD3B2089- | 1465 | 1466 |
| | N31S | | | | | N106G- | | |
| | | | | | | scFv-LH- | | |
| | | | | | | C20B22 | | |
| C923B95 | CD9B643 | 1497 | 1498 | 1499 | 1500 | CD3B2089- | 1465 | 1466 |
| | | | | | | N106G- | | |
| | | | | | | scFv-LH- | | |
| | | | | | | C20B22 | | |
| C923B138 | CD9B643 | 1497 | 1498 | 1499 | 1501 | CD3W245- | 1467 | 1468 |
| | | | | | | scFv LH- | | |
| | | | | | | C20B22 | | |
| C923B139 | CD9B643 | 1497 | 1498 | 1499 | 1501 | CD3B2089- | 1469 | 1470 |
| | | | | | | N106G-scFv | | |
| | | | | | | HL-C20B22 | | |
| C923B140 | CD9B643 | 1497 | 1498 | 1499 | 1501 | CD3W245- | 1471 | 1472 |
| | | | | | | scFv LH- | | |
| | | | | | | 5O10GL | | |
| C923B141 | CD9B643 | 1497 | 1498 | 1499 | 1501 | CD3W245- | 1473 | 1474 |
| | | | | | | scFv LH- | | |
| | | | | | | 4A16GL | | |
| C923B142 | CD9B643 | 1497 | 1498 | 1499 | 1501 | CD3B2030- | 1475 | 1476 |
| | | | | | | N106A-LH | | |
| | | | | | | scFv- | | |
| | | | | | | 5O10GL | | |
| C923B143 | CD9B643 | 1497 | 1498 | 1499 | 1501 | CD3B2030- | 1477 | 1478 |
| | | | | | | N106A-LH | | |
| | | | | | | scFv- | | |
| | | | | | | 4A16GL | | |
| C923B144 | CD9B643 | 1497 | 1498 | 1499 | 1501 | CD3B2089- | 1479 | 1480 |
| | | | | | | N106G-HL | | |
| | | | | | | scFv- | | |
| | | | | | | 5O10GL | | |
| C923B145 | CD9B643 | 1497 | 1498 | 1499 | 1501 | CD3B2089- | 1481 | 1482 |
| | | | | | | N106G-HL | | |
| | | | | | | scFv- | | |
| | | | | | | 4A16GL | | |
| C923B147 | CD9B643 | 1502 | 1503 | 1499 | 1500 | CD3B2030- | 1483 | 1484 |
| | | | | | | N106A-LH | | |
| | | | | | | scFv- | | |
| | | | | | | 4A16GL | | |
| C923B168 | CD9B374 | 1489 | 1490 | 1491 | 1492 | CD3W245- | 1485 | 1486 |
| | | | | | | scFv LH- | | |
| | | | | | | C20B648 | | |
| | | | | | | LH | | |
| C923B169 | CD9B374 | 1489 | 1490 | 1491 | 1492 | CD3B2030- | 1487 | 1488 |
| | | | | | | N106A-LH- | | |
| | | | | | | C20B648 | | |
| | | | | | | LH | | |

trispecific Ab CD3-CD20 arm
SEQ ID NO: 1463
EIVLTQSPATLSASPGERVTLSCSASSSVSYMNWYQQKPGQAPRR
WIYDSSKLASGVPARFSGSGSGRDYTLTISSLEPEDFAVYYCQQW
SRNPPTFGGGTKVEIKGGSEGKSSGSGSESKSTGGSQVQLVQSGA
EVKKPGSSVKVSCKASGYTFTRSTMHWVKQAPGQGLEWIGYINPS
SAYTNYNQKFQGRVTLTADKSTSTAYMELSSLRSEDTAVYYCASP
QVHYDYAGFPYWGQGTLVTVSSEPKSSDKTHTCPPCPAPEAAGGP
SVFLFPPKPKDTLMISRTPEVTCVVVSVSHEDPEVKFNWYVDGVE
VHNAKTKPREEQYNSTYRVVSVLTVLHQDWLNGKEYKCKVSNKAL
PAPIEKTISKAKGQPREPQVYTLPPSREEMTKNQVSLWCLVKGFY
PSDIAVEWESNGQPENNYKTTPPVLDSDGSFFLYSKLTVDKSRWQ
QGNVFSCSVMHEALHNHYTQKSLSLSPGKGGSEGKSSGSGSESKS
TGGSAIQLTQSPSSLSASVGDRVTITCRASSSVSYIHWFQQKPGK
APKPLIYATSNLASGVPSRFSGSGSGTDFTLTISSLQPEDFATYY
CQQWTSNPPTFGQGTKLEIKGGSEGKSSGSGSESKSTGGSQVQLV
QSGAEVKKPGSSVKVSCKASGYTFTSYNMHWVRQAPGQGLEWMGA
IYPGNGDTSYAQKFQGRVTITADKSTSTAYMELSSLRSEDTAVYY
CARSTYYGGDWYFNVWGQGTLVTVSS
trispecific Ab CD3-CD20 arm
SEQ ID NO: 1464
GAGATCGTGCTGACCCAGTCTCCTGCCACACTGAGTGCTTCTCCA
GGCGAGAGAGTGACCCTGTCCTGCTCCGCTTCCTCCTCCGTGTCC
TACATGAACTGGTATCAGCAGAAGCCCGGCCAGGCTCCTCGGAGA
TGGATCTACGACTCTTCCAAGCTGGCCTCTGGTGTGCCAGCCAGA
TTTTCTGGCTCTGGCTCCGGCAGAGACTATACCCTGACCATCTCC
AGCCTGGAACCTGAGGACTTCGCCGTGTACTACTGCCAGCAGTGG
TCTAGGAACCCTCCTACCTTTGGCGGAGGCACCAAGGTGGAAATC
AAGGGCGGATCTGAGGGAAAGTCCAGCGGCTCCGGCAGCGAAAGC
AAGTCCACCGGCGGAAGCCAGGTTCAACTGGTTCAGTCTGGCGCC
GAAGTGAAGAAACCTGGCTCCTCCGTCAAGGTGTCCTGCAAGGCT
TCCGGCTACACCTTTACCAGATCCACCATGCACTGGGTCAAGCAG
GCCCCTGGACAAGGCTTGGAGTGGATCGGCTACATCAACCCCAGC
TCCGCCTACACCAACTACAACCAGAAATTCCAGGGCAGAGTGACC
CTGACCGCCGACAAGTCTACCTCCACCGCCTACATGGAACTGTCC
AGCCTGAGATCTGAGGACACCGCCGTGTACTACTGCGCCTCTCCT
CAGGTCCACTACGACTACGCCGGCTTTCCTTATTGGGGCCAGGGC
ACACTGGTCACCGTTTCTTCTGAGCCCAAATCTAGCGACAAAACT
CACACATGCCCACCGTGCCCAGCACCTGAAGCCGCCGGGGGACCG
TCAGTCTTCCTCTTCCCCCCAAAACCCAAGGACACCCTCATGATC
TCCCGGACCCCTGAGGTCACATGCGTGGTGGTGAGCGTGAGCCAC
GAAGACCCTGAGGTCAAGTTCAACTGGTACGTGGACGGCGTGGAG
GTGCATAATGCCAAGACAAAGCCGCGGGAGGAGCAGTACAACAGC
ACGTACCGTGTGGTCAGCGTCCTCACCGTCCTGCACCAGGACTGG
CTGAATGGCAAGGAGTACAAGTGCAAGGTGTCGAACAAAGCCCTC
CCAGCCCCCATCGAGAAAACCATCTCCAAAGCCAAAGGGCAGCCC
CGAGAACCACAGGTGTACACCCTGCCCCCATCCCGGGAGGAGATG
ACCAAGAACCAGGTCAGCCTGTGGTGCCTGGTCAAAGGCTTCTAT
CCCAGCGACATCGCCGTGGAGTGGGAGAGCAATGGGCAGCCGGAG
AACAACTACAAGACCACGCCTCCCGTGCTGGACTCCGACGGCTCC
TTCTTCCTCTACAGCAAGCTCACCGTGGACAAGAGCAGATGGCAG
CAGGGGAACGTCTTCTCATGCTCCGTGATGCATGAGGCTCTGCAC
AACCACTACACGCAGAAGTCTCTCTCCCTGTCTCCGGGAAAAGGA
GGGAGCGAGGGAAAGTCCAGCGGAAGCGGCTCTGAGTCCAAATCC
ACCGGAGGGAGCGCCATTCAGCTGACCCAGTCTCCATCCTCTCTG
TCCGCCTCTGTGGGCGACAGAGTGACAATTACCTGCCGGGCCTCC
TCCTCCGTGTCCTACATCCATTGGTTCCAGCAGAAGCCCGGCAAG
GCCCCTAAGCCTCTGATCTACGCCACCTCCAATCTGGCCTCTGGC
GTGCCCTCCAGATTTTCCGGATCTGGCTCTGGAACCGACTTTACC
CTGACAATCTCCAGCCTGCAGCCTGAGGACTTCGCCACCTACTAC
TGTCAGCAGTGGACCAGCAATCCTCCTACCTTTGGCCAGGGCACC
AAGCTGGAAATCAAGGGCGGCTCCGAGGGCAAGAGCAGCGGCAGC
GGCAGCGAGAGCAAGAGCACCGGCGGCAGCCAGGTTCAGCTGGTT
CAGTCTGGTGCCGAAGTGAAGAAACCTGGCTCCTCCGTGAAAGTG
TCCTGCAAGGCTTCCGGCTACACTTTTACCAGCTACAACATGCAC
TGGGTCCGACAGGCCCCTGGACAAGGATTGGAATGGATGGGCGCT
ATCTACCCCGGCAACGGCGATACCTCTTACGCCCAGAAATTCCAG
GGCAGAGTGACCATCACCGCCGACAAGTCTACCTCCACCGCCTAC
ATGGAACTGTCCAGCCTGAGATCTGAGGACACCGCCGTGTACTAC
TGCGCCCGGTCTACCTATTATGGCGGCGACTGGTACTTCAACGTG
TGGGGCCAGGGAACCCTGGTCACAGTCTCTTCT
trispecific Ab CD3-CD20 arm
SEQ ID NO: 1465
EIVLTQSPATLSASPGERVTLSCSASSSVSYMNWYQQKPGQAPRR
WIYDSSKLASGVPARFSGSGSGRDYTLTISSLEPEDFAVYYCQQW
SRNPPTFGGGTKVEIKGGSEGKSSGSGSESKSTGGSQVQLVQSGA
EVKKPGSSVKVSCKASGYTFTRSTMHWVRQAPGQGLEWMGYINPS
SAYTNYAQKFQGRVTLTADKSTSTAYMELSSLRSEDTAVYYCASP
QVHYDYGGFPYWGQGTLVTVSSEPKSSDKTHTCPPCPAPEAAGGP
SVFLFPPKPKDTLMISRTPEVTCVVVSVSHEDPEVKFNWYVDGVE
VHNAKTKPREEQYNSTYRVVSVLTVLHQDWLNGKEYKCKVSNKAL
PAPIEKTISKAKGQPREPQVYTLPPSREEMTKNQVSLWCLVKGFY
PSDIAVEWESNGQPENNYKTTPPVLDSDGSFFLYSKLTVDKSRWQ
QGNVFSCSVMHEALHNHYTQKSLSLSPGKGGSEGKSSGSGSESKS
TGGSAIQLTQSPSSLSASVGDRVTITCRASSSVSYIHWFQQKPGK
APKPLIYATSNLASGVPSRFSGSGSGTDFTLTISSLQPEDFATYY
CQQWTSNPPTFGQGTKLEIKGGSEGKSSGSGSESKSTGGSQVQLV
QSGAEVKKPGSSVKVSCKASGYTFTSYNMHWVRQAPGQGLEWMGA
IYPGNGDTSYAQKFQGRVTITADKSTSTAYMELSSLRSEDTAVYY
CARSTYYGGDWYFNVWGQGTLVTVSS
trispecific Ab CD3-CD20 arm
SEQ ID NO: 1466
GAGATCGTGCTGACCCAGTCTCCTGCCACACTGAGTGCTTCTCCA
GGCGAGAGAGTGACCCTGTCCTGCTCCGCTTCCTCCTCCGTGTCC
TACATGAACTGGTATCAGCAGAAGCCCGGCCAGGCTCCTCGGAGA
TGGATCTACGACTCTTCCAAGCTGGCCTCTGGTGTGCCAGCCAGA
TTTTCTGGCTCTGGCTCCGGCAGAGACTATACCCTGACCATCTCC
AGCCTGGAACCTGAGGACTTCGCCGTGTACTACTGCCAGCAGTGG
TCTAGGAACCCTCCTACCTTTGGCGGAGGCACCAAGGTGGAAATC
AAGGGCGGATCTGAGGGAAAGTCCAGCGGCTCCGGCAGCGAAAGC
AAGTCCACCGGCGGAAGCCAGGTTCAACTGGTTCAGTCTGGCGCC
GAAGTGAAGAAACCTGGCTCCTCCGTGAAAGTGTCCTGCAAGGCT
TCCGGCTACACTTTTACCAGATCCACCATGCACTGGGTCCGACAG
GCTCCAGGACAAGGCTTGGAGTGGATGGGCTACATCAACCCCAGC
TCCGCCTACACCAACTACGCCCAGAAATTCCAGGGCAGAGTGACC
CTGACCGCCGACAAGTCTACCTCCACCGCCTACATGGAACTGTCC
AGCCTGAGATCTGAGGACACCGCCGTGTACTACTGCGCTTCTCCT
CAGGTGCACTACGACTACGGCGGCTTTCCTTATTGGGGCCAGGGC
ACACTGGTCACCGTTTCTTCTGAGCCCAAATCTAGCGACAAAACT
CACACATGCCCACCGTGCCCAGCACCTGAAGCCGCCGGGGGACCG
TCAGTCTTCCTCTTCCCCCCAAAACCCAAGGACACCCTCATGATC
TCCCGGACCCCTGAGGTCACATGCGTGGTGGTGAGCGTGAGCCAC
GAAGACCCTGAGGTCAAGTTCAACTGGTACGTGGACGGCGTGGAG
GTGCATAATGCCAAGACAAAGCCGCGGGAGGAGCAGTACAACAGC
ACGTACCGTGTGGTCAGCGTCCTCACCGTCCTGCACCAGGACTGG
CTGAATGGCAAGGAGTACAAGTGCAAGGTGTCGAACAAAGCCCTC
CCAGCCCCCATCGAGAAAACCATCTCCAAAGCCAAAGGGCAGCCC
CGAGAACCACAGGTGTACACCCTGCCCCCATCCCGGGAGGAGATG
ACCAAGAACCAGGTCAGCCTGTGGTGCCTGGTCAAAGGCTTCTAT
CCCAGCGACATCGCCGTGGAGTGGGAGAGCAATGGGCAGCCGGAG
AACAACTACAAGACCACGCCTCCCGTGCTGGACTCCGACGGCTCC
TTCTTCCTCTACAGCAAGCTCACCGTGGACAAGAGCAGATGGCAG
CAGGGGAACGTCTTCTCATGCTCCGTGATGCATGAGGCTCTGCAC
AACCACTACACGCAGAAGTCTCTCTCCCTGTCTCCGGGAAAAGGA
GGGAGCGAGGGAAAGTCCAGCGGAAGCGGCTCTGAGTCCAAATCC
ACCGGAGGGAGCGCCATTCAGCTGACCCAGTCTCCATCCTCTCTG
TCCGCCTCTGTGGGCGACAGAGTGACAATTACCTGCCGGGCCTCC
TCCTCCGTGTCCTACATCCATTGGTTCCAGCAGAAGCCCGGCAAG
GCCCCTAAGCCTCTGATCTACGCCACCTCCAATCTGGCCTCTGGC
GTGCCCTCCAGATTTTCCGGATCTGGCTCTGGAACCGACTTTACC
CTGACAATCTCCAGCCTGCAGCCTGAGGACTTCGCCACCTACTAC
TGTCAGCAGTGGACCAGCAATCCTCCTACCTTTGGCCAGGGCACC
AAGCTGGAAATCAAGGGCGGCTCCGAGGGCAAGAGCAGCGGCAGC
GGCAGCGAGAGCAAGAGCACCGGCGGCAGCCAGGTTCAGCTGGTT
CAGTCTGGTGCCGAAGTGAAGAAACCTGGCTCCTCCGTGAAAGTG
TCCTGCAAGGCTTCCGGCTACACTTTTACCAGCTACAACATGCAC
TGGGTCCGACAGGCCCCTGGACAAGGATTGGAATGGATGGGCGCT
ATCTACCCCGGCAACGGCGATACCTCTTACGCCCAGAAATTCCAG
GGCAGAGTGACCATCACCGCCGACAAGTCTACCTCCACCGCCTAC
ATGGAACTGTCCAGCCTGAGATCTGAGGACACCGCCGTGTACTAC
TGCGCCCGGTCTACCTATTATGGCGGCGACTGGTACTTCAACGTG
TGGGGCCAGGGAACCCTGGTCACAGTCTCTTCT
trispecific Ab CD3-CD20 arm
SEQ ID NO: 1467
DIQMTQSPSSLSASVGDRVTITCRARQSIGTAIHWYQQKPGKAPK
LLIKYASESISGVPSRFSGSGSGTDFTLTISSLQPEDFATYYCQQ
SGSWPYTFGQGTKLEIKGGSEGKSSGSGSESKSTGGSEVQLVESG
GGLVKPGGSLRLSCAASGFTFSRYNMNWVRQAPGKGLEWVSSIST
SSNYIYYADSVKGRFTFSRDNAKNSLDLQMSGLRAEDTAIYYCTR
GWGPFDYWGQGTLVTVSSEPKSSDKTHTCPPCPAPEAAGGPSVFL
FPPKPKDTLMISRTPEVTCVVVSVSHEDPEVKFNWYVDGVEVHNA
KTKPREEQYNSTYRVVSVLTVLHQDWLNGKEYKCKVSNKALPAPI
EKTISKAKGQPREPQVYTLPPSREEMTKNQVSLWCLVKGFYPSDI
AVEWESNGQPENNYKTTPPVLDSDGSFFLYSKLTVDKSRWQQGNV
FSCSVMHEALHNHYTQKSLSLSPGKGGGGSGGGGSAIQLTQSPSS
LSASVGDRVTITCRASSSVSYIHWFQQKPGKAPKPLIYATSNLAS
GVPSRFSGSGSGTDFTLTISSLQPEDFATYYCQQWTSNPPTFGQG
TKLEIKGGSEGKSSGSGSESKSTGGSQVQLVQSGAEVKKPGSSVK
VSCKASGYTFTSYNMHWVRQAPGQGLEWMGAIYPGNGDTSYAQKF
QGRVTITADKSTSTAYMELSSLRSEDTAVYYCARSTYYGGDWYFN
VWGQGTLVTVSS
trispecific Ab CD3-CD20 arm
SEQ ID NO: 1468
GACATACAAATGACACAATCACCCTCTTCTCTTTCTGCAAGCGTT
GGCGACCGTGTCACTATCACTTGTCGAGCCCGCCAGTCCATAGGT
ACTGCCATTCACTGGTATCAACAGAAGCCTGGCAAGGCTCCCAAA
CTCCTGATTAAGTATGCCAGCGAGAGCATTTCCGGCGTACCTTCA
AGATTTTCCGGCTCCGGTAGTGGGACAGATTTCACTCTCACTATA
TCTAGCCTCCAACCAGAAGATTTCGCCACTTACTACTGTCAACAA
TCAGGTTCATGGCCTTACACTTTCGGCCAGGGGACAAAATTGGAG
ATCAAGGGCGGCTCCGAGGGCAAGAGCAGCGGCAGCGGCAGCGAG
AGCAAGAGCACCGGCGGCAGCGAGGTGCAACTGGTGGAGTCTGGG
GGAGGCCTGGTCAAGCCTGGGGGGTCCCTGAGACTCTCCTGTGCA
GCCTCTGGATTCACCTTCAGTAGATATAACATGAACTGGGTCCGC
CAGGCTCCAGGGAAGGGGCTGGAGTGGGTCTCATCCATTAGTACT
AGTAGTAATTACATATACTACGCAGACTCAGTGAAGGGCCGATTC
ACCTTCTCCAGAGACAACGCCAAGAACTCACTGGATCTGCAAATG
AGCGGCCTGAGAGCCGAGGACACGGCTATTTATTACTGTACGAGA
GGCTGGGGGCCTTTTGACTACTGGGGCCAGGGAACCCTGGTCACC
GTCTCCTCAGAGCCCAAATCTAGCGACAAAACTCACACATGTCCA
CCGTGCCCAGCACCTGAAGCAGCAGGGGGACCGTCAGTCTTCCTC
TTCCCCCCAAAACCCAAGGACACCCTCATGATCTCCCGGACCCCT
GAGGTCACATGCGTGGTGGTGAGCGTGAGCCACGAAGACCCTGAG
GTCAAGTTCAACTGGTACGTGGACGGCGTGGAGGTGCATAATGCC
AAGACAAAGCCGCGGGAGGAGCAGTACAACAGCACGTACCGTGTG
GTCAGCGTCCTCACCGTCCTGCACCAGGACTGGCTGAATGGCAAG
GAGTACAAGTGCAAGGTCTCCAACAAAGCCCTCCCAGCCCCCATC
GAGAAAACCATCTCCAAAGCCAAAGGGCAGCCCCGAGAACCACAG
GTGTACACCCTGCCCCCATCCCGGGAGGAGATGACCAAGAACCAG
GTCAGCCTGTGGTGCCTGGTCAAAGGCTTCTATCCCAGCGACATC
GCCGTGGAGTGGGAGAGCAATGGGCAGCCGGAGAACAACTACAAG
ACCACGCCTCCCGTGCTGGACTCCGACGGCTCCTTCTTCCTCTAC
AGCAAGCTCACCGTGGACAAGTCTAGATGGCAGCAGGGGAACGTC
TTCTCATGCTCCGTGATGCATGAGGCTCTGCACAACCACTACACG
CAGAAGAGCCTCTCCCTGTCTCCGGGTAAAGGAGGCGGAGGGAGT
GGCGGGGGAGGCTCTGCAATCCAACTAACTCAAAGTCCAAGTAGT
CTGTCTGCTTCCGTGGGCGACAGAGTGACAATCACCTGTAGAGCC
TCCAGCAGCGTCTCCTACATCCACTGGTTCCAGCAAAAACCTGGC
AAGGCCCCTAAGCCTCTGATCTACGCCACCTCCAACCTGGCCTCT
GGCGTGCCCTCTCGGTTCTCCGGCTCTGGCTCCGGAACCGACTTC
ACCCTGACCATCTCCAGCCTGCAGCCTGAGGATTTTGCTACCTAC
TACTGCCAGCAGTGGACCTCTAACCCTCCAACATTCGGCCAGGGC
ACCAAGCTGGAAATCAAGGGCGGCTCCGAGGGCAAGAGCAGCGGC
AGCGGCAGCGAGAGCAAGAGCACCGGCGGCAGCCAAGTGCAATTA
GTGCAAAGTGGTGCAGAAGTCAAGAAGCCTGGAAGCTCCGTGAAA
GTGTCCTGCAAGGCCTCTGGCTACACCTTTACCTCCTACAACATG
CACTGGGTGCGGCAGGCTCCTGGCCAGGGCCTGGAGTGGATGGGC
GCTATCTACCCCGGCAACGGCGATACCTCTTACGCCCAGAAGTTC
CAGGGCAGAGTGACCATCACCGCCGACAAGTCCACATCTACAGCC
TACATGGAACTGTCCTCCCTGCGGTCCGAGGACACCGCTGTGTAC
TATTGTGCCAGATCTACCTACTACGGCGGCGACTGGTACTTCAAC
GTGTGGGGCCAAGGAACCCTGGTGACCGTGTCTAGC
trispecific Ab CD3-CD20 arm
SEQ ID NO: 1469
QVQLVQSGAEVKKPGSSVKVSCKASGYTFTRSTMHWVRQAPGQGL
EWMGYINPSSAYTNYAQKFQGRVTLTADKSTSTAYMELSSLRSED
TAVYYCASPQVHYDYGGFPYWGQGTLVTVSSGGSEGKSSGSGSES
KSTGGSEIVLTQSPATLSASPGERVTLSCSASSSVSYMNWYQQKP
GQAPRRWIYDSSKLASGVPARFSGSGSGRDYTLTISSLEPEDFAV
YYCQQWSRNPPTFGGGTKVEIKEPKSSDKTHTCPPCPAPEAAGGP
SVFLFPPKPKDTLMISRTPEVTCVVVSVSHEDPEVKFNWYVDGVE
VHNAKTKPREEQYNSTYRVVSVLTVLHQDWLNGKEYKCKVSNKAL
PAPIEKTISKAKGQPREPQVYTLPPSREEMTKNQVSLWCLVKGFY
PSDIAVEWESNGQPENNYKTTPPVLDSDGSFFLYSKLTVDKSRWQ
QGNVFSCSVMHEALHNHYTQKSLSLSPGKGGGGSGGGGSAIQLTQ
SPSSLSASVGDRVTITCRASSSVSYIHWFQQKPGKAPKPLIYATS
NLASGVPSRFSGSGSGTDFTLTISSLQPEDFATYYCQQWTSNPPT
FGQGTKLEIKGGSEGKSSGSGSESKSTGGSQVQLVQSGAEVKKPG
SSVKVSCKASGYTFTSYNMHWVRQAPGQGLEWMGAIYPGNGDTSY
AQKFQGRVTITADKSTSTAYMELSSLRSEDTAVYYCARSTYYGGD
WYFNVWGQGTLVTVSS
trispecific Ab CD3-CD20 arm
SEQ ID NO: 1470
CAGGTGCAGCTGGTGCAGAGCGGCGCCGAGGTGAAGAAGCCTGGC
AGCAGCGTGAAGGTGAGCTGTAAGGCCAGCGGCTACACTTTCACT
AGGAGCACTATGCACTGGGTGAGGCAGGCCCCTGGCCAGGGCCTG
GAGTGGATGGGCTACATCAATCCTAGCAGCGCCTACACTAATTAC
GCCCAGAAGTTCCAGGGCAGGGTGACTCTGACTGCCGATAAGAGC
ACTAGCACTGCCTACATGGAGCTGAGCAGCCTGAGGAGCGAGGAT
ACTGCCGTGTACTACTGTGCCAGCCCTCAGGTGCACTACGATTAC
GGCGGCTTCCCTTACTGGGGCCAGGGCACTCTGGTGACTGTGAGC
AGCGGCGGCTCCGAGGGCAAGAGCAGCGGCAGCGGCAGCGAGAGC
AAGAGCACCGGCGGCAGCGAGATCGTGCTGACTCAGAGCCCTGCC
ACTCTGAGCGCCAGCCCTGGCGAGAGGGTGACTCTGAGCTGTAGC
GCCAGCAGCAGCGTGAGCTACATGAATTGGTACCAGCAGAAGCCT
GGCCAGGCCCCTAGGAGGTGGATCTACGATAGCAGCAAGCTGGCC
AGCGGCGTGCCTGCCAGGTTCAGCGGCAGCGGCAGCGGCAGGGAT
TACACTCTGACTATCAGCAGCCTGGAGCCTGAGGATTTCGCCGTG
TACTACTGTCAGCAGTGGAGCAGGAATCCTCCTACTTTCGGCGGC
GGCACTAAGGTGGAGATCAAGGAGCCCAAATCTAGCGACAAAACT
CACACATGTCCACCGTGCCCAGCACCTGAAGCAGCAGGGGGACCG
TCAGTCTTCCTCTTCCCCCCAAAACCCAAGGACACCCTCATGATC
TCCCGGACCCCTGAGGTCACATGCGTGGTGGTGAGCGTGAGCCAC
GAAGACCCTGAGGTCAAGTTCAACTGGTACGTGGACGGCGTGGAG
GTGCATAATGCCAAGACAAAGCCGCGGGAGGAGCAGTACAACAGC
ACGTACCGTGTGGTCAGCGTCCTCACCGTCCTGCACCAGGACTGG
CTGAATGGCAAGGAGTACAAGTGCAAGGTCTCCAACAAAGCCCTC
CCAGCCCCCATCGAGAAAACCATCTCCAAAGCCAAAGGGCAGCCC
CGAGAACCACAGGTGTACACCCTGCCCCCATCCCGGGAGGAGATG
ACCAAGAACCAGGTCAGCCTGTGGTGCCTGGTCAAAGGCTTCTAT
CCCAGCGACATCGCCGTGGAGTGGGAGAGCAATGGGCAGCCGGAG
AACAACTACAAGACCACGCCTCCCGTGCTGGACTCCGACGGCTCC
TTCTTCCTCTACAGCAAGCTCACCGTGGACAAGTCTAGATGGCAG
CAGGGGAACGTCTTCTCATGCTCCGTGATGCATGAGGCTCTGCAC
AACCACTACACGCAGAAGAGCCTCTCCCTGTCTCCGGGTAAAGGA
GGCGGAGGGAGTGGCGGGGGAGGCTCTGCAATCCAACTAACTCAA
AGTCCAAGTAGTCTGTCTGCTTCCGTGGGCGACAGAGTGACAATC
ACCTGTAGAGCCTCCAGCAGCGTCTCCTACATCCACTGGTTCCAG
CAAAAACCTGGCAAGGCCCCTAAGCCTCTGATCTACGCCACCTCC
AACCTGGCCTCTGGCGTGCCCTCTCGGTTCTCCGGCTCTGGCTCC
GGAACCGACTTCACCCTGACCATCTCCAGCCTGCAGCCTGAGGAT
TTTGCTACCTACTACTGCCAGCAGTGGACCTCTAACCCTCCAACA
TTCGGCCAGGGCACCAAGCTGGAAATCAAGGGCGGCTCCGAGGGC
AAGAGCAGCGGCAGCGGCAGCGAGAGCAAGAGCACCGGCGGCAGC
CAAGTGCAATTAGTGCAAAGTGGTGCAGAAGTCAAGAAGCCTGGA
AGCTCCGTGAAAGTGTCCTGCAAGGCCTCTGGCTACACCTTTACC
TCCTACAACATGCACTGGGTGCGGCAGGCTCCTGGCCAGGGCCTG
GAGTGGATGGGCGCTATCTACCCCGGCAACGGCGATACCTCTTAC
GCCCAGAAGTTCCAGGGCAGAGTGACCATCACCGCCGACAAGTCC
ACATCTACAGCCTACATGGAACTGTCCTCCCTGCGGTCCGAGGAC
ACCGCTGTGTACTATTGTGCCAGATCTACCTACTACGGCGGCGAC
TGGTACTTCAACGTGTGGGGCCAAGGAACCCTGGTGACCGTGTCT
AGC
trispecific Ab CD3-CD20 arm
SEQ ID NO: 1471
DIQMTQSPSSLSASVGDRVTITCRARQSIGTAIHWYQQKPGKAPK
LLIKYASESISGVPSRFSGSGSGTDFTLTISSLQPEDFATYYCQQ
SGSWPYTFGQGTKLEIKGGSEGKSSGSGSESKSTGGSEVQLVESG
GGLVKPGGSLRLSCAASGFTFSRYNMNWVRQAPGKGLEWVSSIST
SSNYIYYADSVKGRFTFSRDNAKNSLDLQMSGLRAEDTAIYYCTR
GWGPFDYWGQGTLVTVSSEPKSSDKTHTCPPCPAPEAAGGPSVFL
FPPKPKDTLMISRTPEVTCVVVSVSHEDPEVKFNWYVDGVEVHNA
KTKPREEQYNSTYRVVSVLTVLHQDWLNGKEYKCKVSNKALPAPI
EKTISKAKGQPREPQVYTLPPSREEMTKNQVSLWCLVKGFYPSDI
AVEWESNGQPENNYKTTPPVLDSDGSFFLYSKLTVDKSRWQQGNV
FSCSVMHEALHNHYTQKSLSLSPGKGGGGSGGGGSQIVLSQSPAI
LSASPGEKVTMTCRASSSVSYMHWYQQKPGSSPQVWIYATSNLAS
GVPVRFSGSGSGTSYSLTISRVEAEDTATYYCQQWIFNPPTFGSG
TKLEIRGGSEGKSSGSGSESKSTGGSQAYLQQSGAELVRPGASVK
MSCKASGYTFTSYNMHWVKQTPRQGLEWIGAIYPGNGDTSYNQKF
KGKATLTVDKSSSTAYMQLSSLTSEDSAVYFCARVYYGSNYWYFD
VWGTGTTVTVSS
trispecific Ab CD3-CD20 arm
SEQ ID NO: 1472
GACATACAAATGACACAATCACCCTCTTCTCTTTCTGCAAGCGTT
GGCGACCGTGTCACTATCACTTGTCGAGCCCGCCAGTCCATAGGT
ACTGCCATTCACTGGTATCAACAGAAGCCTGGCAAGGCTCCCAAA
CTCCTGATTAAGTATGCCAGCGAGAGCATTTCCGGCGTACCTTCA
AGATTTTCCGGCTCCGGTAGTGGGACAGATTTCACTCTCACTATA
TCTAGCCTCCAACCAGAAGATTTCGCCACTTACTACTGTCAACAA
TCAGGTTCATGGCCTTACACTTTCGGCCAGGGGACAAAATTGGAG
ATCAAGGGCGGCTCCGAGGGCAAGAGCAGCGGCAGCGGCAGCGAG
AGCAAGAGCACCGGCGGCAGCGAGGTGCAACTGGTGGAGTCTGGG
GGAGGCCTGGTCAAGCCTGGGGGGTCCCTGAGACTCTCCTGTGCA
GCCTCTGGATTCACCTTCAGTAGATATAACATGAACTGGGTCCGC
CAGGCTCCAGGGAAGGGGCTGGAGTGGGTCTCATCCATTAGTACT
AGTAGTAATTACATATACTACGCAGACTCAGTGAAGGGCCGATTC
ACCTTCTCCAGAGACAACGCCAAGAACTCACTGGATCTGCAAATG
AGCGGCCTGAGAGCCGAGGACACGGCTATTTATTACTGTACGAGA
GGCTGGGGGCCTTTTGACTACTGGGGCCAGGGAACCCTGGTCACC
GTCTCCTCAGAGCCCAAATCTAGCGACAAAACTCACACATGTCCA
CCGTGCCCAGCACCTGAAGCAGCAGGGGGACCGTCAGTCTTCCTC
TTCCCCCCAAAACCCAAGGACACCCTCATGATCTCCCGGACCCCT
GAGGTCACATGCGTGGTGGTGAGCGTGAGCCACGAAGACCCTGAG
GTCAAGTTCAACTGGTACGTGGACGGCGTGGAGGTGCATAATGCC
AAGACAAAGCCGCGGGAGGAGCAGTACAACAGCACGTACCGTGTG
GTCAGCGTCCTCACCGTCCTGCACCAGGACTGGCTGAATGGCAAG
GAGTACAAGTGCAAGGTCTCCAACAAAGCCCTCCCAGCCCCCATC
GAGAAAACCATCTCCAAAGCCAAAGGGCAGCCCCGAGAACCACAG
GTGTACACCCTGCCCCCATCCCGGGAGGAGATGACCAAGAACCAG
GTCAGCCTGTGGTGCCTGGTCAAAGGCTTCTATCCCAGCGACATC
GCCGTGGAGTGGGAGAGCAATGGGCAGCCGGAGAACAACTACAAG
ACCACGCCTCCCGTGCTGGACTCCGACGGCTCCTTCTTCCTCTAC
AGCAAGCTCACCGTGGACAAGTCTAGATGGCAGCAGGGGAACGTC
TTCTCATGCTCCGTGATGCATGAGGCTCTGCACAACCACTACACG
CAGAAGAGCCTCTCCCTGTCTCCGGGTAAAGGAGGCGGAGGGAGT
GGCGGGGGAGGCTCTCAAATAGTCCTTTCACAGTCCCCAGCTATT
CTTTCAGCCTCTCCCGGTGAAAAGGTTACAATGACCTGCCGGGCA
AGCTCCAGTGTCTCATATATGCACTGGTACCAACAAAAACCTGGC
AGTAGTCCTCAGGTGTGGATCTACGCTACAAGCAATCTCGCTTCC
GGGGTTCCCGTGAGGTTTAGCGGAAGCGGGTCTGGAACTAGTTAT
TCCTTGACAATTAGTCGGGTTGAAGCCGAGGACACCGCCACTTAC
TATTGCCAACAGTGGATATTCAATCCACCCACCTTCGGTTCAGGT
ACCAAGCTCGAAATCCGTGGCGGCTCCGAGGGCAAGAGCAGCGGC
AGCGGCAGCGAGAGCAAGAGCACCGGCGGCAGCCAAGCATATCTG
CAACAGAGCGGAGCTGAGCTGGTTCGGCCTGGCGCCTCTGTAAAA
ATGAGTTGCAAGGCCAGTGGTTATACATTCACATCATATAATATG
CACTGGGTAAAGCAAACTCCCCGACAGGGGCTTGAATGGATTGGC
GCAATCTATCCCGGCAATGGGGATACATCCTACAATCAGAAATTC
AAGGGCAAGGCAACACTGACCGTTGACAAATCCTCATCAACAGCC
TACATGCAGCTCAGTTCCCTCACTAGCGAAGATTCTGCTGTGTAT
TTCTGTGCAAGGGTGTATTATGGTTCTAATTACTGGTATTTCGAT
GTTTGGGGAACCGGAACTACCGTAACTGTTTCTAGC
trispecific Ab CD3-CD20 arm
SEQ ID NO: 1473
DIQMTQSPSSLSASVGDRVTITCRARQSIGTAIHWYQQKPGKAPK
LLIKYASESISGVPSRFSGSGSGTDFTLTISSLQPEDFATYYCQQ
SGSWPYTFGQGTKLEIKGGSEGKSSGSGSESKSTGGSEVQLVESG
GGLVKPGGSLRLSCAASGFTFSRYNMNWVRQAPGKGLEWVSSIST
SSNYIYYADSVKGRFTFSRDNAKNSLDLQMSGLRAEDTAIYYCTR
GWGPFDYWGQGTLVTVSSEPKSSDKTHTCPPCPAPEAAGGPSVFL
FPPKPKDTLMISRTPEVTCVVVSVSHEDPEVKFNWYVDGVEVHNA
KTKPREEQYNSTYRVVSVLTVLHQDWLNGKEYKCKVSNKALPAPI
EKTISKAKGQPREPQVYTLPPSREEMTKNQVSLWCLVKGFYPSDI
AVEWESNGQPENNYKTTPPVLDSDGSFFLYSKLTVDKSRWQQGNV
FSCSVMHEALHNHYTQKSLSLSPGKGGGGSGGGGSQIVLSQSPAI
LSASPGEKVTMTCRASLSVSSMHWYQQKPGSSPKPWIYATSNLAS
GVPARFSGSGSGTSYSLTISRVEAEDAATYYCQQWIFNPPTFGGG
TKLEIKGGSEGKSSGSGSESKSTGGSQAYLQQSGAELVRPGASVK
MSCKTSGYTFSSYNMHWVKQTPRQALEWIGAIYPGNGDTSYNQKF
KGKATLTVDKSSSTAYMQLSSLTSEDSAVYFCTRSNYYGSSGWYF
DVWGTGTTVTVSS
trispecific Ab CD3-CD20 arm
SEQ ID NO: 1474
GACATACAAATGACACAATCACCCTCTTCTCTTTCTGCAAGCGTT
GGCGACCGTGTCACTATCACTTGTCGAGCCCGCCAGTCCATAGGT
ACTGCCATTCACTGGTATCAACAGAAGCCTGGCAAGGCTCCCAAA
CTCCTGATTAAGTATGCCAGCGAGAGCATTTCCGGCGTACCTTCA
AGATTTTCCGGCTCCGGTAGTGGGACAGATTTCACTCTCACTATA
TCTAGCCTCCAACCAGAAGATTTCGCCACTTACTACTGTCAACAA
TCAGGTTCATGGCCTTACACTTTCGGCCAGGGGACAAAATTGGAG
ATCAAGGGCGGCTCCGAGGGCAAGAGCAGCGGCAGCGGCAGCGAG
AGCAAGAGCACCGGCGGCAGCGAGGTGCAACTGGTGGAGTCTGGG
GGAGGCCTGGTCAAGCCTGGGGGGTCCCTGAGACTCTCCTGTGCA
GCCTCTGGATTCACCTTCAGTAGATATAACATGAACTGGGTCCGC
CAGGCTCCAGGGAAGGGGCTGGAGTGGGTCTCATCCATTAGTACT
AGTAGTAATTACATATACTACGCAGACTCAGTGAAGGGCCGATTC
ACCTTCTCCAGAGACAACGCCAAGAACTCACTGGATCTGCAAATG
AGCGGCCTGAGAGCCGAGGACACGGCTATTTATTACTGTACGAGA
GGCTGGGGGCCTTTTGACTACTGGGGCCAGGGAACCCTGGTCACC
GTCTCCTCAGAGCCCAAATCTAGCGACAAAACTCACACATGTCCA
CCGTGCCCAGCACCTGAAGCAGCAGGGGGACCGTCAGTCTTCCTC
TTCCCCCCAAAACCCAAGGACACCCTCATGATCTCCCGGACCCCT
GAGGTCACATGCGTGGTGGTGAGCGTGAGCCACGAAGACCCTGAG
GTCAAGTTCAACTGGTACGTGGACGGCGTGGAGGTGCATAATGCC
AAGACAAAGCCGCGGGAGGAGCAGTACAACAGCACGTACCGTGTG
GTCAGCGTCCTCACCGTCCTGCACCAGGACTGGCTGAATGGCAAG
GAGTACAAGTGCAAGGTCTCCAACAAAGCCCTCCCAGCCCCCATC
GAGAAAACCATCTCCAAAGCCAAAGGGCAGCCCCGAGAACCACAG
GTGTACACCCTGCCCCCATCCCGGGAGGAGATGACCAAGAACCAG
GTCAGCCTGTGGTGCCTGGTCAAAGGCTTCTATCCCAGCGACATC
GCCGTGGAGTGGGAGAGCAATGGGCAGCCGGAGAACAACTACAAG
ACCACGCCTCCCGTGCTGGACTCCGACGGCTCCTTCTTCCTCTAC
AGCAAGCTCACCGTGGACAAGTCTAGATGGCAGCAGGGGAACGTC
TTCTCATGCTCCGTGATGCATGAGGCTCTGCACAACCACTACACG
CAGAAGAGCCTCTCCCTGTCTCCGGGTAAAGGAGGCGGAGGGAGT
GGCGGGGGAGGCTCTCAGATTGTCCTGAGCCAATCCCCAGCAATT
CTGAGTGCTAGCCCTGGAGAGAAGGTAACAATGACTTGTCGGGCA
TCCCTTAGCGTCTCATCCATGCATTGGTATCAACAAAAGCCAGGT
TCATCTCCAAAACCCTGGATTTACGCTACATCTAACCTGGCATCT
GGGGTGCCTGCCAGATTTAGTGGATCTGGTTCCGGCACATCATAT
TCCCTTACAATCAGCCGAGTGGAAGCCGAGGATGCTGCAACCTAT
TACTGTCAACAATGGATATTTAACCCTCCCACCTTTGGGGGTGGG
ACTAAACTCGAAATCAAGGGCGGCTCCGAGGGCAAGAGCAGCGGC
AGCGGCAGCGAGAGCAAGAGCACCGGCGGCAGCCAAGCCTATCTT
CAACAATCTGGGGCTGAGCTTGTCCGGCCAGGAGCCTCCGTCAAA
ATGAGCTGCAAAACCTCAGGTTATACTTTTAGTAGCTATAACATG
CATTGGGTAAAACAAACCCCCCGACAAGCATTGGAGTGGATAGGG
GCCATATACCCCGGCAATGGAGACACAAGTTACAACCAGAAGTTT
AAAGGCAAAGCTACACTCACAGTTGACAAATCCTCAAGTACTGCT
TATATGCAACTCTCCTCTCTCACTTCCGAAGACAGTGCCGTATAT
TTTTGCACTCGGTCCAATTACTATGGATCTAGTGGCTGGTACTTT
GACGTTTGGGGCACTGGGACAACTGTTACAGTGTCCAGC
trispecific Ab CD3-CD20 arm
SEQ ID NO: 1475
EIVLTQSPATLSASPGERVTLSCSASSSVSYMNWYQQKPGQAPRR
WIYDSSKLASGVPARFSGSGSGRDYTLTISSLEPEDFAVYYCQQW
SRNPPTFGGGTKVEIKGGSEGKSSGSGSESKSTGGSQVQLVQSGA
EVKKPGSSVKVSCKASGYTFTRSTMHWVKQAPGQGLEWIGYINPS
SAYTNYNQKFQGRVTLTADKSTSTAYMELSSLRSEDTAVYYCASP
QVHYDYAGFPYWGQGTLVTVSSEPKSSDKTHTCPPCPAPEAAGGP
SVFLFPPKPKDTLMISRTPEVTCVVVSVSHEDPEVKFNWYVDGVE
VHNAKTKPREEQYNSTYRVVSVLTVLHQDWLNGKEYKCKVSNKAL
PAPIEKTISKAKGQPREPQVYTLPPSREEMTKNQVSLWCLVKGFY
PSDIAVEWESNGQPENNYKTTPPVLDSDGSFFLYSKLTVDKSRWQ
QGNVFSCSVMHEALHNHYTQKSLSLSPGKGGGGSGGGGSQIVLSQ
SPAILSASPGEKVTMTCRASSSVSYMHWYQQKPGSSPQVWIYATS
NLASGVPVRFSGSGSGTSYSLTISRVEAEDTATYYCQQWIFNPPT
FGSGTKLEIRGGSEGKSSGSGSESKSTGGSQAYLQQSGAELVRPG
ASVKMSCKASGYTFTSYNMHWVKQTPRQGLEWIGAIYPGNGDTSY
NQKFKGKATLTVDKSSSTAYMQLSSLTSEDSAVYFCARVYYGSNY
WYFDVWGTGTTVTVSS
trispecific Ab CD3-CD20 arm
SEQ ID NO: 1476
GAGATCGTGCTGACTCAGAGCCCTGCCACTCTGAGCGCCAGCCCT
GGCGAGAGGGTGACTCTGAGCTGTAGCGCCAGCAGCAGCGTGAGC
TACATGAATTGGTACCAGCAGAAGCCTGGCCAGGCCCCTAGGAGG
TGGATCTACGATAGCAGCAAGCTGGCCAGCGGCGTGCCTGCCAGG
TTCAGCGGCAGCGGCAGCGGCAGGGATTACACTCTGACTATCAGC
AGCCTGGAGCCTGAGGATTTCGCCGTGTACTACTGTCAGCAGTGG
AGCAGGAATCCTCCTACTTTCGGCGGCGGCACTAAGGTGGAGATC
AAGGGCGGCTCCGAGGGCAAGAGCAGCGGCAGCGGCAGCGAGAGC
AAGAGCACCGGCGGCAGCCAGGTGCAGCTGGTGCAGAGCGGCGCC
GAGGTGAAGAAGCCTGGCAGCAGCGTGAAGGTGAGCTGTAAGGCC
AGCGGCTACACTTTCACTAGGAGCACTATGCACTGGGTGAAGCAG
GCCCCTGGCCAGGGCCTGGAGTGGATCGGCTACATCAATCCTAGC
AGCGCCTACACTAATTACAATCAGAAGTTCCAGGGCAGGGTGACT
CTGACTGCCGATAAGAGCACTAGCACTGCCTACATGGAGCTGAGC
AGCCTGAGGAGCGAGGATACTGCCGTGTACTACTGTGCCAGCCCT
CAGGTGCACTACGATTACGCCGGCTTCCCTTACTGGGGCCAGGGC
ACTCTGGTGACTGTGAGCAGCGAGCCCAAATCTAGCGACAAAACT
CACACATGTCCACCGTGCCCAGCACCTGAAGCAGCAGGGGGACCG
TCAGTCTTCCTCTTCCCCCCAAAACCCAAGGACACCCTCATGATC
TCCCGGACCCCTGAGGTCACATGCGTGGTGGTGAGCGTGAGCCAC
GAAGACCCTGAGGTCAAGTTCAACTGGTACGTGGACGGCGTGGAG
GTGCATAATGCCAAGACAAAGCCGCGGGAGGAGCAGTACAACAGC
ACGTACCGTGTGGTCAGCGTCCTCACCGTCCTGCACCAGGACTGG
CTGAATGGCAAGGAGTACAAGTGCAAGGTCTCCAACAAAGCCCTC
CCAGCCCCCATCGAGAAAACCATCTCCAAAGCCAAAGGGCAGCCC
CGAGAACCACAGGTGTACACCCTGCCCCCATCCCGGGAGGAGATG
ACCAAGAACCAGGTCAGCCTGTGGTGCCTGGTCAAAGGCTTCTAT
CCCAGCGACATCGCCGTGGAGTGGGAGAGCAATGGGCAGCCGGAG
AACAACTACAAGACCACGCCTCCCGTGCTGGACTCCGACGGCTCC
TTCTTCCTCTACAGCAAGCTCACCGTGGACAAGTCTAGATGGCAG
CAGGGGAACGTCTTCTCATGCTCCGTGATGCATGAGGCTCTGCAC
AACCACTACACGCAGAAGAGCCTCTCCCTGTCTCCGGGTAAAGGA
GGCGGAGGGAGTGGCGGGGGAGGCTCTCAAATAGTCCTTTCACAG
TCCCCAGCTATTCTTTCAGCCTCTCCCGGTGAAAAGGTTACAATG
ACCTGCCGGGCAAGCTCCAGTGTCTCATATATGCACTGGTACCAA
CAAAAACCTGGCAGTAGTCCTCAGGTGTGGATCTACGCTACAAGC
AATCTCGCTTCCGGGGTTCCCGTGAGGTTTAGCGGAAGCGGGTCT
GGAACTAGTTATTCCTTGACAATTAGTCGGGTTGAAGCCGAGGAC
ACCGCCACTTACTATTGCCAACAGTGGATATTCAATCCACCCACC
TTCGGTTCAGGTACCAAGCTCGAAATCCGTGGCGGCTCCGAGGGC
AAGAGCAGCGGCAGCGGCAGCGAGAGCAAGAGCACCGGCGGCAGC
CAAGCATATCTGCAACAGAGCGGAGCTGAGCTGGTTCGGCCTGGC
GCCTCTGTAAAAATGAGTTGCAAGGCCAGTGGTTATACATTCACA
TCATATAATATGCACTGGGTAAAGCAAACTCCCCGACAGGGGCTT
GAATGGATTGGCGCAATCTATCCCGGCAATGGGGATACATCCTAC
AATCAGAAATTCAAGGGCAAGGCAACACTGACCGTTGACAAATCC
TCATCAACAGCCTACATGCAGCTCAGTTCCCTCACTAGCGAAGAT
TCTGCTGTGTATTTCTGTGCAAGGGTGTATTATGGTTCTAATTAC
TGGTATTTCGATGTTTGGGGAACCGGAACTACCGTAACTGTTTCT
AGC
trispecific Ab CD3-CD20 arm
SEQ ID NO: 1477
EIVLTQSPATLSASPGERVTLSCSASSSVSYMNWYQQKPGQAPRR
WIYDSSKLASGVPARFSGSGSGRDYTLTISSLEPEDFAVYYCQQW
SRNPPTFGGGTKVEIKGGSEGKSSGSGSESKSTGGSQVQLVQSGA
EVKKPGSSVKVSCKASGYTFTRSTMHWVKQAPGQGLEWIGYINPS
SAYTNYNQKFQGRVTLTADKSTSTAYMELSSLRSEDTAVYYCASP
QVHYDYAGFPYWGQGTLVTVSSEPKSSDKTHTCPPCPAPEAAGGP
SVFLFPPKPKDTLMISRTPEVTCVVVSVSHEDPEVKFNWYVDGVE
VHNAKTKPREEQYNSTYRVVSVLTVLHQDWLNGKEYKCKVSNKAL
PAPIEKTISKAKGQPREPQVYTLPPSREEMTKNQVSLWCLVKGFY
PSDIAVEWESNGQPENNYKTTPPVLDSDGSFFLYSKLTVDKSRWQ
QGNVFSCSVMHEALHNHYTQKSLSLSPGKGGGGSGGGGSQIVLSQ
SPAILSASPGEKVTMTCRASLSVSSMHWYQQKPGSSPKPWIYATS
NLASGVPARESGSGSGTSYSLTISRVEAEDAATYYCQQWIFNPPT
FGGGTKLEIKGGSEGKSSGSGSESKSTGGSQAYLQQSGAELVRPG
ASVKMSCKTSGYTFSSYNMHWVKQTPRQALEWIGAIYPGNGDTSY
NQKFKGKATLTVDKSSSTAYMQLSSLTSEDSAVYFCTRSNYYGSS
GWYFDVWGTGTTVTVSS
trispecific Ab CD3-CD20 arm
SEQ ID NO: 1478
GAGATCGTGCTGACTCAGAGCCCTGCCACTCTGAGCGCCAGCCCT
GGCGAGAGGGTGACTCTGAGCTGTAGCGCCAGCAGCAGCGTGAGC
TACATGAATTGGTACCAGCAGAAGCCTGGCCAGGCCCCTAGGAGG
TGGATCTACGATAGCAGCAAGCTGGCCAGCGGCGTGCCTGCCAGG
TTCAGCGGCAGCGGCAGCGGCAGGGATTACACTCTGACTATCAGC
AGCCTGGAGCCTGAGGATTTCGCCGTGTACTACTGTCAGCAGTGG
AGCAGGAATCCTCCTACTTTCGGCGGCGGCACTAAGGTGGAGATC
AAGGGCGGCTCCGAGGGCAAGAGCAGCGGCAGCGGCAGCGAGAGC
AAGAGCACCGGCGGCAGCCAGGTGCAGCTGGTGCAGAGCGGCGCC
GAGGTGAAGAAGCCTGGCAGCAGCGTGAAGGTGAGCTGTAAGGCC
AGCGGCTACACTTTCACTAGGAGCACTATGCACTGGGTGAAGCAG
GCCCCTGGCCAGGGCCTGGAGTGGATCGGCTACATCAATCCTAGC
AGCGCCTACACTAATTACAATCAGAAGTTCCAGGGCAGGGTGACT
CTGACTGCCGATAAGAGCACTAGCACTGCCTACATGGAGCTGAGC
AGCCTGAGGAGCGAGGATACTGCCGTGTACTACTGTGCCAGCCCT
CAGGTGCACTACGATTACGCCGGCTTCCCTTACTGGGGCCAGGGC
ACTCTGGTGACTGTGAGCAGCGAGCCCAAATCTAGCGACAAAACT
CACACATGTCCACCGTGCCCAGCACCTGAAGCAGCAGGGGGACCG
TCAGTCTTCCTCTTCCCCCCAAAACCCAAGGACACCCTCATGATC
TCCCGGACCCCTGAGGTCACATGCGTGGTGGTGAGCGTGAGCCAC
GAAGACCCTGAGGTCAAGTTCAACTGGTACGTGGACGGCGTGGAG
GTGCATAATGCCAAGACAAAGCCGCGGGAGGAGCAGTACAACAGC
ACGTACCGTGTGGTCAGCGTCCTCACCGTCCTGCACCAGGACTGG
CTGAATGGCAAGGAGTACAAGTGCAAGGTCTCCAACAAAGCCCTC
CCAGCCCCCATCGAGAAAACCATCTCCAAAGCCAAAGGGCAGCCC
CGAGAACCACAGGTGTACACCCTGCCCCCATCCCGGGAGGAGATG
ACCAAGAACCAGGTCAGCCTGTGGTGCCTGGTCAAAGGCTTCTAT
CCCAGCGACATCGCCGTGGAGTGGGAGAGCAATGGGCAGCCGGAG
AACAACTACAAGACCACGCCTCCCGTGCTGGACTCCGACGGCTCC
TTCTTCCTCTACAGCAAGCTCACCGTGGACAAGTCTAGATGGCAG
CAGGGGAACGTCTTCTCATGCTCCGTGATGCATGAGGCTCTGCAC
AACCACTACACGCAGAAGAGCCTCTCCCTGTCTCCGGGTAAAGGA
GGCGGAGGGAGTGGCGGGGGAGGCTCTCAGATTGTCCTGAGCCAA
TCCCCAGCAATTCTGAGTGCTAGCCCTGGAGAGAAGGTAACAATG
ACTTGTCGGGCATCCCTTAGCGTCTCATCCATGCATTGGTATCAA
CAAAAGCCAGGTTCATCTCCAAAACCCTGGATTTACGCTACATCT
AACCTGGCATCTGGGGTGCCTGCCAGATTTAGTGGATCTGGTTCC
GGCACATCATATTCCCTTACAATCAGCCGAGTGGAAGCCGAGGAT
GCTGCAACCTATTACTGTCAACAATGGATATTTAACCCTCCCACC
TTTGGGGGTGGGACTAAACTCGAAATCAAGGGCGGCTCCGAGGGC
AAGAGCAGCGGCAGCGGCAGCGAGAGCAAGAGCACCGGCGGCAGC
CAAGCCTATCTTCAACAATCTGGGGCTGAGCTTGTCCGGCCAGGA
GCCTCCGTCAAAATGAGCTGCAAAACCTCAGGTTATACTTTTAGT
AGCTATAACATGCATTGGGTAAAACAAACCCCCCGACAAGCATTG
GAGTGGATAGGGGCCATATACCCCGGCAATGGAGACACAAGTTAC
AACCAGAAGTTTAAAGGCAAAGCTACACTCACAGTTGACAAATCC
TCAAGTACTGCTTATATGCAACTCTCCTCTCTCACTTCCGAAGAC
AGTGCCGTATATTTTTGCACTCGGTCCAATTACTATGGATCTAGT
GGCTGGTACTTTGACGTTTGGGGCACTGGGACAACTGTTACAGTG
TCCAGC
trispecific Ab CD3-CD20 arm
SEQ ID NO: 1479
QVQLVQSGAEVKKPGSSVKVSCKASGYTFTRSTMHWVRQAPGQGL
EWMGYINPSSAYTNYAQKFQGRVTLTADKSTSTAYMELSSLRSED
TAVYYCASPQVHYDYGGFPYWGQGTLVTVSSGGSEGKSSGSGSES
KSTGGSEIVLTQSPATLSASPGERVTLSCSASSSVSYMNWYQQKP
GQAPRRWIYDSSKLASGVPARFSGSGSGRDYTLTISSLEPEDFAV
YYCQQWSRNPPTFGGGTKVEIKEPKSSDKTHTCPPCPAPEAAGGP
SVFLFPPKPKDTLMISRTPEVTCVVVSVSHEDPEVKFNWYVDGVE
VHNAKTKPREEQYNSTYRVVSVLTVLHQDWLNGKEYKCKVSNKAL
PAPIEKTISKAKGQPREPQVYTLPPSREEMTKNQVSLWCLVKGFY
PSDIAVEWESNGQPENNYKTTPPVLDSDGSFFLYSKLTVDKSRWQ
QGNVFSCSVMHEALHNHYTQKSLSLSPGKGGGGSGGGGSQIVLSQ
SPAILSASPGEKVTMTCRASSSVSYMHWYQQKPGSSPQVWIYATS
NLASGVPVRFSGSGSGTSYSLTISRVEAEDTATYYCQQWIFNPPT
FGSGTKLEIRGGSEGKSSGSGSESKSTGGSQAYLQQSGAELVRPG
ASVKMSCKASGYTFTSYNMHWVKQTPRQGLEWIGAIYPGNGDTSY
NQKFKGKATLTVDKSSSTAYMQLSSLTSEDSAVYFCARVYYGSNY
WYFDVWGTGTTVTVSS
trispecific Ab CD3-CD20 arm
SEQ ID NO: 1480
CAGGTGCAGCTGGTGCAGAGCGGCGCCGAGGTGAAGAAGCCTGGC
AGCAGCGTGAAGGTGAGCTGTAAGGCCAGCGGCTACACTTTCACT
AGGAGCACTATGCACTGGGTGAGGCAGGCCCCTGGCCAGGGCCTG
GAGTGGATGGGCTACATCAATCCTAGCAGCGCCTACACTAATTAC
GCCCAGAAGTTCCAGGGCAGGGTGACTCTGACTGCCGATAAGAGC
ACTAGCACTGCCTACATGGAGCTGAGCAGCCTGAGGAGCGAGGAT
ACTGCCGTGTACTACTGTGCCAGCCCTCAGGTGCACTACGATTAC
GGCGGCTTCCCTTACTGGGGCCAGGGCACTCTGGTGACTGTGAGC
AGCGGCGGCTCCGAGGGCAAGAGCAGCGGCAGCGGCAGCGAGAGC
AAGAGCACCGGCGGCAGCGAGATCGTGCTGACTCAGAGCCCTGCC
ACTCTGAGCGCCAGCCCTGGCGAGAGGGTGACTCTGAGCTGTAGC
GCCAGCAGCAGCGTGAGCTACATGAATTGGTACCAGCAGAAGCCT
GGCCAGGCCCCTAGGAGGTGGATCTACGATAGCAGCAAGCTGGCC
AGCGGCGTGCCTGCCAGGTTCAGCGGCAGCGGCAGCGGCAGGGAT
TACACTCTGACTATCAGCAGCCTGGAGCCTGAGGATTTCGCCGTG
TACTACTGTCAGCAGTGGAGCAGGAATCCTCCTACTTTCGGCGGC
GGCACTAAGGTGGAGATCAAGGAGCCCAAATCTAGCGACAAAACT
CACACATGTCCACCGTGCCCAGCACCTGAAGCAGCAGGGGGACCG
TCAGTCTTCCTCTTCCCCCCAAAACCCAAGGACACCCTCATGATC
TCCCGGACCCCTGAGGTCACATGCGTGGTGGTGAGCGTGAGCCAC
GAAGACCCTGAGGTCAAGTTCAACTGGTACGTGGACGGCGTGGAG
GTGCATAATGCCAAGACAAAGCCGCGGGAGGAGCAGTACAACAGC
ACGTACCGTGTGGTCAGCGTCCTCACCGTCCTGCACCAGGACTGG
CTGAATGGCAAGGAGTACAAGTGCAAGGTCTCCAACAAAGCCCTC
CCAGCCCCCATCGAGAAAACCATCTCCAAAGCCAAAGGGCAGCCC
CGAGAACCACAGGTGTACACCCTGCCCCCATCCCGGGAGGAGATG
ACCAAGAACCAGGTCAGCCTGTGGTGCCTGGTCAAAGGCTTCTAT
CCCAGCGACATCGCCGTGGAGTGGGAGAGCAATGGGCAGCCGGAG
AACAACTACAAGACCACGCCTCCCGTGCTGGACTCCGACGGCTCC
TTCTTCCTCTACAGCAAGCTCACCGTGGACAAGTCTAGATGGCAG
CAGGGGAACGTCTTCTCATGCTCCGTGATGCATGAGGCTCTGCAC
AACCACTACACGCAGAAGAGCCTCTCCCTGTCTCCGGGTAAAGGA
GGCGGAGGGAGTGGCGGGGGAGGCTCTCAAATAGTCCTTTCACAG
TCCCCAGCTATTCTTTCAGCCTCTCCCGGTGAAAAGGTTACAATG
ACCTGCCGGGCAAGCTCCAGTGTCTCATATATGCACTGGTACCAA
CAAAAACCTGGCAGTAGTCCTCAGGTGTGGATCTACGCTACAAGC
AATCTCGCTTCCGGGGTTCCCGTGAGGTTTAGCGGAAGCGGGTCT
GGAACTAGTTATTCCTTGACAATTAGTCGGGTTGAAGCCGAGGAC
ACCGCCACTTACTATTGCCAACAGTGGATATTCAATCCACCCACC
TTCGGTTCAGGTACCAAGCTCGAAATCCGTGGCGGCTCCGAGGGC
AAGAGCAGCGGCAGCGGCAGCGAGAGCAAGAGCACCGGCGGCAGC
CAAGCATATCTGCAACAGAGCGGAGCTGAGCTGGTTCGGCCTGGC
GCCTCTGTAAAAATGAGTTGCAAGGCCAGTGGTTATACATTCACA
TCATATAATATGCACTGGGTAAAGCAAACTCCCCGACAGGGGCTT
GAATGGATTGGCGCAATCTATCCCGGCAATGGGGATACATCCTAC
AATCAGAAATTCAAGGGCAAGGCAACACTGACCGTTGACAAATCC
TCATCAACAGCCTACATGCAGCTCAGTTCCCTCACTAGCGAAGAT
TCTGCTGTGTATTTCTGTGCAAGGGTGTATTATGGTTCTAATTAC
TGGTATTTCGATGTTTGGGGAACCGGAACTACCGTAACTGTTTCT
AGC
trispecific Ab CD3-CD20 arm
SEQ ID NO: 1481
QVQLVQSGAEVKKPGSSVKVSCKASGYTFTRSTMHWVRQAPGQGL
EWMGYINPSSAYTNYAQKFQGRVTLTADKSTSTAYMELSSLRSED
TAVYYCASPQVHYDYGGFPYWGQGTLVTVSSGGSEGKSSGSGSES
KSTGGSEIVLTQSPATLSASPGERVTLSCSASSSVSYMNWYQQKP
GQAPRRWIYDSSKLASGVPARFSGSGSGRDYTLTISSLEPEDFAV
YYCQQWSRNPPTFGGGTKVEIKEPKSSDKTHTCPPCPAPEAAGGP
SVFLFPPKPKDTLMISRTPEVTCVVVSVSHEDPEVKFNWYVDGVE
VHNAKTKPREEQYNSTYRVVSVLTVLHQDWLNGKEYKCKVSNKAL
PAPIEKTISKAKGQPREPQVYTLPPSREEMTKNQVSLWCLVKGFY
PSDIAVEWESNGQPENNYKTTPPVLDSDGSFFLYSKLTVDKSRWQ
QGNVFSCSVMHEALHNHYTQKSLSLSPGKGGGGSGGGGSQIVLSQ
SPAILSASPGEKVTMTCRASLSVSSMHWYQQKPGSSPKPWIYATS
NLASGVPARESGSGSGTSYSLTISRVEAEDAATYYCQQWIFNPPT
FGGGTKLEIKGGSEGKSSGSGSESKSTGGSQAYLQQSGAELVRPG
ASVKMSCKTSGYTFSSYNMHWVKQTPRQALEWIGAIYPGNGDTSY
NQKFKGKATLTVDKSSSTAYMQLSSLTSEDSAVYFCTRSNYYGSS
GWYFDVWGTGTTVTVSS
trispecific Ab CD3-CD20 arm
SEQ ID NO: 1482
CAGGTGCAGCTGGTGCAGAGCGGCGCCGAGGTGAAGAAGCCTGGC
AGCAGCGTGAAGGTGAGCTGTAAGGCCAGCGGCTACACTTTCACT
AGGAGCACTATGCACTGGGTGAGGCAGGCCCCTGGCCAGGGCCTG
GAGTGGATGGGCTACATCAATCCTAGCAGCGCCTACACTAATTAC
GCCCAGAAGTTCCAGGGCAGGGTGACTCTGACTGCCGATAAGAGC
ACTAGCACTGCCTACATGGAGCTGAGCAGCCTGAGGAGCGAGGAT
ACTGCCGTGTACTACTGTGCCAGCCCTCAGGTGCACTACGATTAC
GGCGGCTTCCCTTACTGGGGCCAGGGCACTCTGGTGACTGTGAGC
AGCGGCGGCTCCGAGGGCAAGAGCAGCGGCAGCGGCAGCGAGAGC
AAGAGCACCGGCGGCAGCGAGATCGTGCTGACTCAGAGCCCTGCC
ACTCTGAGCGCCAGCCCTGGCGAGAGGGTGACTCTGAGCTGTAGC
GCCAGCAGCAGCGTGAGCTACATGAATTGGTACCAGCAGAAGCCT
GGCCAGGCCCCTAGGAGGTGGATCTACGATAGCAGCAAGCTGGCC
AGCGGCGTGCCTGCCAGGTTCAGCGGCAGCGGCAGCGGCAGGGAT
TACACTCTGACTATCAGCAGCCTGGAGCCTGAGGATTTCGCCGTG
TACTACTGTCAGCAGTGGAGCAGGAATCCTCCTACTTTCGGCGGC
GGCACTAAGGTGGAGATCAAGGAGCCCAAATCTAGCGACAAAACT
CACACATGTCCACCGTGCCCAGCACCTGAAGCAGCAGGGGGACCG
TCAGTCTTCCTCTTCCCCCCAAAACCCAAGGACACCCTCATGATC
TCCCGGACCCCTGAGGTCACATGCGTGGTGGTGAGCGTGAGCCAC
GAAGACCCTGAGGTCAAGTTCAACTGGTACGTGGACGGCGTGGAG
GTGCATAATGCCAAGACAAAGCCGCGGGAGGAGCAGTACAACAGC
ACGTACCGTGTGGTCAGCGTCCTCACCGTCCTGCACCAGGACTGG
CTGAATGGCAAGGAGTACAAGTGCAAGGTCTCCAACAAAGCCCTC
CCAGCCCCCATCGAGAAAACCATCTCCAAAGCCAAAGGGCAGCCC
CGAGAACCACAGGTGTACACCCTGCCCCCATCCCGGGAGGAGATG
ACCAAGAACCAGGTCAGCCTGTGGTGCCTGGTCAAAGGCTTCTAT
CCCAGCGACATCGCCGTGGAGTGGGAGAGCAATGGGCAGCCGGAG
AACAACTACAAGACCACGCCTCCCGTGCTGGACTCCGACGGCTCC
TTCTTCCTCTACAGCAAGCTCACCGTGGACAAGTCTAGATGGCAG
CAGGGGAACGTCTTCTCATGCTCCGTGATGCATGAGGCTCTGCAC
AACCACTACACGCAGAAGAGCCTCTCCCTGTCTCCGGGTAAAGGA
GGCGGAGGGAGTGGCGGGGGAGGCTCTCAGATTGTCCTGAGCCAA
TCCCCAGCAATTCTGAGTGCTAGCCCTGGAGAGAAGGTAACAATG
ACTTGTCGGGCATCCCTTAGCGTCTCATCCATGCATTGGTATCAA
CAAAAGCCAGGTTCATCTCCAAAACCCTGGATTTACGCTACATCT
AACCTGGCATCTGGGGTGCCTGCCAGATTTAGTGGATCTGGTTCC
GGCACATCATATTCCCTTACAATCAGCCGAGTGGAAGCCGAGGAT
GCTGCAACCTATTACTGTCAACAATGGATATTTAACCCTCCCACC
TTTGGGGGTGGGACTAAACTCGAAATCAAGGGCGGCTCCGAGGGC
AAGAGCAGCGGCAGCGGCAGCGAGAGCAAGAGCACCGGCGGCAGC
CAAGCCTATCTTCAACAATCTGGGGCTGAGCTTGTCCGGCCAGGA
GCCTCCGTCAAAATGAGCTGCAAAACCTCAGGTTATACTTTTAGT
AGCTATAACATGCATTGGGTAAAACAAACCCCCCGACAAGCATTG
GAGTGGATAGGGGCCATATACCCCGGCAATGGAGACACAAGTTAC
AACCAGAAGTTTAAAGGCAAAGCTACACTCACAGTTGACAAATCC
TCAAGTACTGCTTATATGCAACTCTCCTCTCTCACTTCCGAAGAC
AGTGCCGTATATTTTTGCACTCGGTCCAATTACTATGGATCTAGT
GGCTGGTACTTTGACGTTTGGGGCACTGGGACAACTGTTACAGTG
TCCAGC
trispecific Ab CD3-CD20 arm
SEQ ID NO: 1483
EIVLTQSPATLSASPGERVTLSCSASSSVSYMNWYQQKPGQAPRR
WIYDSSKLASGVPARFSGSGSGRDYTLTISSLEPEDFAVYYCQQW
SRNPPTFGGGTKVEIKGGSEGKSSGSGSESKSTGGSQVQLVQSGA
EVKKPGSSVKVSCKASGYTFTRSTMHWVKQAPGQGLEWIGYINPS
SAYTNYNQKFQGRVTLTADKSTSTAYMELSSLRSEDTAVYYCASP
QVHYDYAGFPYWGQGTLVTVSSEPKSSDKTHTCPPCPAPEAAGGP
SVFLFPPKPKDTLMISRTPEVTCVVVSVSHEDPEVKFNWYVDGVE
VHNAKTKPREEQYNSTYRVVSVLTVLHQDWLNGKEYKCKVSNKAL
PAPIEKTISKAKGQPREPQVYTLPPSREEMTKNQVSLSCAVKGFY
PSDIAVEWESNGQPENNYKTTPPVLDSDGSFFLVSKLTVDKSRWQ
QGNVFSCSVMHEALHNRFTQKSLSLSPGKGGGGSGGGGSGGGGSG
GGGSQIVLSQSPAILSASPGEKVTMTCRASLSVSSMHWYQQKPGS
SPKPWIYATSNLASGVPARFSGSGSGTSYSLTISRVEAEDAATYY
CQQWIFNPPTFGGGTKLEIKGGSEGKSSGSGSESKSTGGSQAYLQ
QSGAELVRPGASVKMSCKTSGYTFSSYNMHWVKQTPRQALEWIGA
IYPGNGDTSYNQKFKGKATLTVDKSSSTAYMQLSSLTSEDSAVYF
CTRSNYYGSSGWYFDVWGTGTTVTVSS
trispecific Ab CD3-CD20 arm
SEQ ID NO: 1484
GAGATCGTGCTGACCCAGTCTCCTGCCACACTGAGTGCTTCTCCA
GGCGAGAGAGTGACCCTGTCCTGCTCCGCTTCCTCCTCCGTGTCC
TACATGAACTGGTATCAGCAGAAGCCCGGCCAGGCTCCTCGGAGA
TGGATCTACGACTCTTCCAAGCTGGCCTCTGGTGTGCCAGCCAGA
TTTTCTGGCTCTGGCTCCGGCAGAGACTATACCCTGACCATCTCC
AGCCTGGAACCTGAGGACTTCGCCGTGTACTACTGCCAGCAGTGG
TCTAGGAACCCTCCTACCTTTGGCGGAGGCACCAAGGTGGAAATC
AAGGGCGGATCTGAGGGAAAGTCCAGCGGCTCCGGCAGCGAAAGC
AAGTCCACCGGCGGAAGCCAGGTTCAACTGGTTCAGTCTGGCGCC
GAAGTGAAGAAACCTGGCTCCTCCGTCAAGGTGTCCTGCAAGGCT
TCCGGCTACACCTTTACCAGATCCACCATGCACTGGGTCAAGCAG
GCCCCTGGACAAGGCTTGGAGTGGATCGGCTACATCAACCCCAGC
TCCGCCTACACCAACTACAACCAGAAATTCCAGGGCAGAGTGACC
CTGACCGCCGACAAGTCTACCTCCACCGCCTACATGGAACTGTCC
AGCCTGAGATCTGAGGACACCGCCGTGTACTACTGCGCCTCTCCT
CAGGTCCACTACGACTACGCCGGCTTTCCTTATTGGGGCCAGGGC
ACACTGGTCACCGTTTCTTCTGAGCCCAAATCTAGCGACAAAACT
CACACATGCCCACCGTGCCCAGCACCTGAAGCCGCCGGGGGACCG
TCAGTCTTCCTCTTCCCCCCAAAACCCAAGGACACCCTCATGATC
TCCCGGACCCCTGAGGTCACATGCGTGGTGGTGAGCGTGAGCCAC
GAAGACCCTGAGGTCAAGTTCAACTGGTACGTGGACGGCGTGGAG
GTGCATAATGCCAAGACAAAGCCGCGGGAGGAGCAGTACAACAGC
ACGTACCGTGTGGTCAGCGTCCTCACCGTCCTGCACCAGGACTGG
CTGAATGGCAAGGAGTACAAGTGCAAGGTGTCGAACAAAGCCCTC
CCAGCCCCCATCGAGAAAACCATCTCCAAAGCCAAAGGGCAGCCC
CGAGAACCACAGGTGTACACCCTGCCCCCATCCCGGGAGGAGATG
ACCAAGAACCAGGTCAGCCTGTCCTGCGCCGTCAAAGGCTTCTAT
CCCAGCGACATCGCCGTGGAGTGGGAGAGCAATGGGCAGCCGGAG
AACAACTACAAGACCACGCCTCCCGTGCTGGACTCCGACGGCTCC
TTCTTCCTCGTGAGCAAGCTCACCGTGGACAAGAGCAGATGGCAG
CAGGGGAACGTCTTCTCATGCTCCGTGATGCATGAGGCTCTGCAC
AACCGGTTCACGCAGAAGTCTCTCTCCCTGTCTCCGGGAAAAGGA
GGCGGAGGATCTGGCGGAGGTGGAAGTGGCGGAGGCGGTTCTGGT
GGTGGTGGATCTCAGATCGTGCTGTCTCAGTCTCCAGCTATCCTG
TCTGCTAGCCCTGGCGAGAAAGTGACCATGACCTGTAGAGCCAGC
CTGTCCGTGTCCTCCATGCACTGGTATCAGCAGAAGCCTGGCAGC
TCCCCTAAGCCTTGGATCTACGCCACCTCCAATCTGGCCTCTGGC
GTGCCAGCTAGATTCTCCGGATCTGGCTCCGGCACCTCCTACAGC
CTGACAATCTCCAGAGTGGAAGCCGAGGATGCCGCCACCTACTAC
TGTCAGCAGTGGATCTTCAACCCTCCTACCTTCGGCGGAGGCACC
AAGCTGGAAATCAAGGGAGGGAGCGAGGGAAAGTCCAGCGGAAGC
GGCTCTGAGTCCAAATCCACCGGAGGGAGCCAGGCTTACTTGCAG
CAGTCTGGTGCCGAACTCGTTAGACCTGGAGCCTCCGTGAAGATG
TCCTGCAAGACCTCCGGCTACACCTTCTCCAGCTACAACATGCAC
TGGGTCAAGCAGACCCCTCGGCAGGCTCTGGAATGGATCGGCGCT
ATCTATCCTGGCAACGGCGACACCTCCTACAACCAGAAGTTCAAG
GGCAAAGCTACCCTGACCGTGGACAAGTCCTCCTCCACCGCTTAC
ATGCAGCTGTCCAGCCTGACCTCTGAGGACTCCGCCGTGTACTTC
TGCACCCGGTCTAACTACTACGGCTCCTCCGGCTGGTACTTCGAT
GTGTGGGGAACCGGAACCACCGTGACAGTCTCTTCT
trispecific Ab CD3-CD20 arm
SEQ ID NO: 1485
DIQMTQSPSSLSASVGDRVTITCRARQSIGTAIHWYQQKPGKAPK
LLIKYASESISGVPSRFSGSGSGTDFTLTISSLQPEDFATYYCQQ
SGSWPYTFGQGTKLEIKGGSEGKSSGSGSESKSTGGSEVQLVESG
GGLVKPGGSLRLSCAASGFTFSRYNMNWVRQAPGKGLEWVSSIST
SSNYIYYADSVKGRFTFSRDNAKNSLDLQMSGLRAEDTAIYYCTR
GWGPFDYWGQGTLVTVSSEPKSSDKTHTCPPCPAPEAAGGPSVFL
FPPKPKDTLMISRTPEVTCVVVSVSHEDPEVKFNWYVDGVEVHNA
KTKPREEQYNSTYRVVSVLTVLHQDWLNGKEYKCKVSNKALPAPI
EKTISKAKGQPREPQVYTLPPSREEMTKNQVSLWCLVKGFYPSDI
AVEWESNGQPENNYKTTPPVLDSDGSFFLYSKLTVDKSRWQQGNV
FSCSVMHEALHNHYTQKSLSLSPGKGGGGSGGGGSGGGGSGGGGS
EIVLTQSPATLSLSPGERATLSCRASLSVSSMHWYQQKPGQAPRL
LIYATSNLASGIPARFSGSGSGTDFTLTISSLEPEDFAVYYCQQW
IFNPPTFGGGTKVEIKGGSEGKSSGSGSESKSTGGSQVQLVQSGA
EVKKPGSSVKVSCKASGYTFSSYNMHWVRQAPGQGLEWMGAIYPG
AGDTSYAQKFQGRVTITADESTSTAYMELSSLRSEDTAVYYCARS
NYYGSSGWYFDVWGKGTTVTVSS
trispecific Ab CD3-CD20 arm
SEQ ID NO: 1486
GACATCCAGATGACCCAGTCTCCATCCTCTCTGTCCGCCTCTGTG
GGCGACAGAGTGACCATTACCTGCCGGGCCAGACAGTCTATCGGC
ACCGCTATCCACTGGTATCAGCAGAAGCCTGGCAAGGCCCCTAAG
CTGCTGATTAAGTACGCCTCCGAGTCCATCTCCGGCGTGCCCTCC
AGATTTTCTGGCTCTGGATCTGGCACCGACTTTACCCTGACAATC
TCCAGCCTGCAGCCTGAGGACTTCGCCACCTACTACTGTCAGCAG
TCCGGCTCTTGGCCTTACACCTTTGGTCAGGGCACCAAGCTGGAA
ATCAAGGGCGGATCTGAGGGAAAGTCCAGCGGCTCCGGCAGCGAA
AGCAAGTCCACCGGCGGAAGCGAGGTGCAGCTGGTTGAATCTGGC
GGAGGACTGGTTAAGCCTGGCGGCTCTCTGAGACTGTCTTGTGCT
GCTTCTGGCTTCACCTTCAGCCGGTACAACATGAACTGGGTCCGA
CAGGCTCCTGGCAAAGGCCTGGAATGGGTGTCCTCCATCTCCACC
TCCAGCAACTACATCTACTACGCCGACTCCGTGAAGGGCAGATTC
ACCTTCTCCAGAGACAACGCCAAGAACTCCCTGGACCTGCAGATG
TCTGGCCTGAGAGCTGAGGACACCGCTATCTACTACTGCACCAGA
GGCTGGGGACCCTTCGATTATTGGGGCCAGGGAACCCTGGTCACC
GTGTCATCTGAGCCCAAATCTAGCGACAAAACTCACACATGCCCA
CCGTGCCCAGCACCTGAAGCCGCCGGGGGACCGTCAGTCTTCCTC
TTCCCCCCAAAACCCAAGGACACCCTCATGATCTCCCGGACCCCT
GAGGTCACATGCGTGGTGGTGAGCGTGAGCCACGAAGACCCTGAG
GTCAAGTTCAACTGGTACGTGGACGGCGTGGAGGTGCATAATGCC
AAGACAAAGCCGCGGGAGGAGCAGTACAACAGCACGTACCGTGTG
GTCAGCGTCCTCACCGTCCTGCACCAGGACTGGCTGAATGGCAAG
GAGTACAAGTGCAAGGTGTCGAACAAAGCCCTCCCAGCCCCCATC
GAGAAAACCATCTCCAAAGCCAAAGGGCAGCCCCGAGAACCACAG
GTGTACACCCTGCCCCCATCCCGGGAGGAGATGACCAAGAACCAG
GTCAGCCTGTGGTGCCTGGTCAAAGGCTTCTATCCCAGCGACATC
GCCGTGGAGTGGGAGAGCAATGGGCAGCCGGAGAACAACTACAAG
ACCACGCCTCCCGTGCTGGACTCCGACGGCTCCTTCTTCCTCTAC
AGCAAGCTCACCGTGGACAAGAGCAGATGGCAGCAGGGGAACGTC
TTCTCATGCTCCGTGATGCATGAGGCTCTGCACAACCACTACACG
CAGAAGTCTCTCTCCCTGTCTCCGGGAAAAGGAGGCGGAGGATCT
GGCGGAGGTGGAAGTGGCGGAGGCGGTTCTGGTGGTGGTGGATCT
GAGATCGTGCTGACCCAGTCTCCAGCCACACTGTCACTGTCTCCA
GGCGAGAGAGCTACCCTGTCCTGTAGAGCCTCTCTGTCCGTGTCC
TCCATGCACTGGTATCAGCAGAAGCCTGGACAGGCCCCTCGGCTG
CTGATCTACGCTACCTCTAATCTGGCCAGCGGTATCCCCGCCAGA
TTTTCTGGTTCTGGCTCTGGCACCGACTTTACCCTGACCATCTCC
AGCCTGGAACCTGAGGACTTCGCCGTGTACTACTGCCAGCAGTGG
ATCTTCAACCCTCCTACCTTTGGCGGAGGCACCAAGGTGGAAATC
AAGGGAGGGAGCGAGGGAAAGTCCAGCGGAAGCGGCTCTGAGTCC
AAATCCACCGGAGGGAGCCAGGTTCAACTGGTTCAGTCTGGCGCC
GAAGTGAAGAAACCTGGCTCCTCCGTGAAGGTGTCCTGCAAGGCT
TCCGGCTACACCTTCTCCAGCTACAACATGCACTGGGTCCGACAG
GCCCCTGGACAAGGATTGGAATGGATGGGCGCTATCTACCCTGGC
GCTGGCGATACCTCTTACGCCCAGAAATTCCAGGGCAGAGTGACC
ATCACCGCCGACGAGTCTACCTCCACCGCCTACATGGAACTGTCC
AGCCTGAGATCTGAGGACACCGCCGTGTACTACTGCGCCCGGTCT
AATTACTACGGCTCCAGCGGCTGGTACTTCGACGTGTGGGGAAAG
GGCACCACCGTGACAGTCTCTTCT
trispecific Ab CD3-CD20 arm
SEQ ID NO: 1487
EIVLTQSPATLSASPGERVTLSCSASSSVSYMNWYQQKPGQAPRR
WIYDSSKLASGVPARFSGSGSGRDYTLTISSLEPEDFAVYYCQQW
SRNPPTFGGGTKVEIKGGSEGKSSGSGSESKSTGGSQVQLVQSGA
EVKKPGSSVKVSCKASGYTFTRSTMHWVKQAPGQGLEWIGYINPS
SAYTNYNQKFQGRVTLTADKSTSTAYMELSSLRSEDTAVYYCASP
QVHYDYAGFPYWGQGTLVTVSSEPKSSDKTHTCPPCPAPEAAGGP
SVFLFPPKPKDTLMISRTPEVTCVVVSVSHEDPEVKFNWYVDGVE
VHNAKTKPREEQYNSTYRVVSVLTVLHQDWLNGKEYKCKVSNKAL
PAPIEKTISKAKGQPREPQVYTLPPSREEMTKNQVSLWCLVKGFY
PSDIAVEWESNGQPENNYKTTPPVLDSDGSFFLYSKLTVDKSRWQ
QGNVFSCSVMHEALHNHYTQKSLSLSPGKGGGGSGGGGSGGGGSG
GGGSEIVLTQSPATLSLSPGERATLSCRASLSVSSMHWYQQKPGQ
APRLLIYATSNLASGIPARFSGSGSGTDFTLTISSLEPEDFAVYY
CQQWIFNPPTFGGGTKVEIKGGSEGKSSGSGSESKSTGGSQVQLV
QSGAEVKKPGSSVKVSCKASGYTFSSYNMHWVRQAPGQGLEWMGA
IYPGAGDTSYAQKFQGRVTITADESTSTAYMELSSLRSEDTAVYY
CARSNYYGSSGWYFDVWGKGTTVTVSS
trispecific Ab CD3-CD20 arm
SEQ ID NO: 1488
GAGATCGTGCTGACCCAGTCTCCTGCCACACTGAGTGCTTCTCCA
GGCGAGAGAGTGACCCTGTCCTGCTCCGCTTCCTCCTCCGTGTCC
TACATGAACTGGTATCAGCAGAAGCCCGGCCAGGCTCCTCGGAGA
TGGATCTACGACTCTTCCAAGCTGGCCTCTGGTGTGCCAGCCAGA
TTTTCTGGCTCTGGCTCCGGCAGAGACTATACCCTGACCATCTCC
AGCCTGGAACCTGAGGACTTCGCCGTGTACTACTGCCAGCAGTGG
TCTAGGAACCCTCCTACCTTTGGCGGAGGCACCAAGGTGGAAATC
AAGGGCGGATCTGAGGGAAAGTCCAGCGGCTCCGGCAGCGAAAGC
AAGTCCACCGGCGGAAGCCAGGTTCAACTGGTTCAGTCTGGCGCC
GAAGTGAAGAAACCTGGCTCCTCCGTCAAGGTGTCCTGCAAGGCT
TCCGGCTACACCTTTACCAGATCCACCATGCACTGGGTCAAGCAG
GCCCCTGGACAAGGCTTGGAGTGGATCGGCTACATCAACCCCAGC
TCCGCCTACACCAACTACAACCAGAAATTCCAGGGCAGAGTGACC
CTGACCGCCGACAAGTCTACCTCCACCGCCTACATGGAACTGTCC
AGCCTGAGATCTGAGGACACCGCCGTGTACTACTGCGCCTCTCCT
CAGGTCCACTACGACTACGCCGGCTTTCCTTATTGGGGCCAGGGC
ACACTGGTCACCGTTTCTTCTGAGCCCAAATCTAGCGACAAAACT
CACACATGCCCACCGTGCCCAGCACCTGAAGCCGCCGGGGGACCG
TCAGTCTTCCTCTTCCCCCCAAAACCCAAGGACACCCTCATGATC
TCCCGGACCCCTGAGGTCACATGCGTGGTGGTGAGCGTGAGCCAC
GAAGACCCTGAGGTCAAGTTCAACTGGTACGTGGACGGCGTGGAG
GTGCATAATGCCAAGACAAAGCCGCGGGAGGAGCAGTACAACAGC
ACGTACCGTGTGGTCAGCGTCCTCACCGTCCTGCACCAGGACTGG
CTGAATGGCAAGGAGTACAAGTGCAAGGTGTCGAACAAAGCCCTC
CCAGCCCCCATCGAGAAAACCATCTCCAAAGCCAAAGGGCAGCCC
CGAGAACCACAGGTGTACACCCTGCCCCCATCCCGGGAGGAGATG
ACCAAGAACCAGGTCAGCCTGTGGTGCCTGGTCAAAGGCTTCTAT
CCCAGCGACATCGCCGTGGAGTGGGAGAGCAATGGGCAGCCGGAG
AACAACTACAAGACCACGCCTCCCGTGCTGGACTCCGACGGCTCC
TTCTTCCTCTACAGCAAGCTCACCGTGGACAAGAGCAGATGGCAG
CAGGGGAACGTCTTCTCATGCTCCGTGATGCATGAGGCTCTGCAC
AACCACTACACGCAGAAGTCTCTCTCCCTGTCTCCGGGAAAAGGA
GGCGGAGGATCTGGCGGAGGTGGAAGTGGCGGAGGCGGTTCTGGT
GGTGGTGGATCTGAGATCGTGCTGACCCAGTCTCCAGCCACACTG
TCACTGTCTCCAGGCGAGAGAGCTACCCTGTCCTGTAGAGCCTCT
CTGTCCGTGTCCTCCATGCACTGGTATCAGCAGAAGCCTGGACAG
GCCCCTCGGCTGCTGATCTACGCTACCTCTAATCTGGCCAGCGGT
ATCCCCGCCAGATTTTCTGGTTCTGGCTCTGGCACCGACTTTACC
CTGACCATCTCCAGCCTGGAACCTGAGGACTTCGCCGTGTACTAC
TGCCAGCAGTGGATCTTCAACCCTCCTACCTTTGGCGGAGGCACC
AAGGTGGAAATCAAGGGAGGGAGCGAGGGAAAGTCCAGCGGAAGC
GGCTCTGAGTCCAAATCCACCGGAGGGAGCCAGGTTCAACTGGTT
CAGTCTGGCGCCGAAGTGAAGAAACCTGGCTCCTCCGTGAAGGTG
TCCTGCAAGGCTTCCGGCTACACCTTCTCCAGCTACAACATGCAC
TGGGTCCGACAGGCCCCTGGACAAGGATTGGAATGGATGGGCGCT
ATCTACCCTGGCGCTGGCGATACCTCTTACGCCCAGAAATTCCAG
GGCAGAGTGACCATCACCGCCGACGAGTCTACCTCCACCGCCTAC
ATGGAACTGTCCAGCCTGAGATCTGAGGACACCGCCGTGTACTAC
TGCGCCCGGTCTAATTACTACGGCTCCAGCGGCTGGTACTTCGAC
GTGTGGGGAAAGGGCACCACCGTGACAGTCTCTTCT
trispecific/bispecific Ab CD79b arm HC
SEQ ID NO: 1489
QVQLQESGPGLVKPSETLSLTCSVSGASISSFYWSWIRQPADE
GLEWIGRISPSGKTNYIPSLKSRIIMSLDASKNQFSLRLNSVTAA
DTAMYYCARGEYSGTYSYSFDVWGQGTMVTVSSASTKGPSVFPLA
PSSKSTSGGTAALGCLVKDYFPEPVTVSWNSGALTSGVHTFPAVL
QSSGLYSLSSVVTVPSSSLGTQTYICNVNHKPSNTKVDKKVEPKS
CDKTHTCPPCPAPEAAGGPSVFLFPPKPKDTLMISRTPEVTCVVV
SVSHEDPEVKFNWYVDGVEVHNAKTKPREEQYNSTYRVVSVLTVL
HQDWLNGKEYKCKVSNKALPAPIEKTISKAKGQPREPQVYTLPPS
REEMTKNQVSLSCAVKGFYPSDIAVEWESNGQPENNYKTTPPVLD
SDGSFFLVSKLTVDKSRWQQGNVFSCSVMHEALHNRFTQKSLSLS
PGK
trispecific/bispecific Ab CD79b arm HC
SEQ ID NO: 1490
CAGGTTCAGCTGCAAGAGTCTGGTCCTGGCCTGGTCAAGCCTT
CCGAGACACTGTCTCTGACCTGCTCTGTGTCCGGCGCCTCCATCT
CTTCCTTCTACTGGTCCTGGATCCGGCAGCCTGCTGACGAAGGAC
TGGAATGGATCGGCCGGATCAGCCCTTCTGGCAAGACCAACTACA
TCCCCAGCCTGAAGTCCCGGATCATCATGTCCCTGGACGCCTCCA
AGAACCAGTTCTCCCTGCGGCTGAACTCTGTGACCGCTGCCGATA
CCGCCATGTACTACTGTGCCAGAGGCGAGTACTCCGGCACCTACT
CCTACAGCTTTGACGTGTGGGGACAAGGCACCATGGTCACAGTTT
CTTCTGCCTCCACCAAGGGCCCATCGGTCTTCCCCCTGGCACCCT
CCTCCAAGAGCACCTCTGGGGGCACAGCGGCCCTGGGCTGCCTGG
TCAAGGACTACTTCCCCGAACCGGTGACGGTGTCGTGGAACTCAG
GCGCCCTGACCAGCGGCGTGCACACCTTCCCGGCTGTCCTACAGT
CCTCAGGACTCTACTCCCTCAGCAGCGTGGTGACCGTGCCCTCCA
GCAGCTTGGGCACCCAGACCTACATCTGCAACGTGAATCACAAGC
CCAGCAACACCAAGGTGGACAAGAAAGTTGAGCCCAAATCTTGTG
ACAAAACTCACACATGCCCACCGTGCCCAGCACCTGAAGCCGCCG
GGGGACCGTCAGTCTTCCTCTTCCCCCCAAAACCCAAGGACACCC
TCATGATCTCCCGGACCCCTGAGGTCACATGCGTGGTGGTGAGCG
TGAGCCACGAAGACCCTGAGGTCAAGTTCAACTGGTACGTGGACG
GCGTGGAGGTGCATAATGCCAAGACAAAGCCGCGGGAGGAGCAGT
ACAACAGCACGTACCGTGTGGTCAGCGTCCTCACCGTCCTGCACC
AGGACTGGCTGAATGGCAAGGAGTACAAGTGCAAGGTGTCGAACA
AAGCCCTCCCAGCCCCCATCGAGAAAACCATCTCCAAAGCCAAAG
GGCAGCCCCGAGAACCACAGGTGTACACCCTGCCCCCATCCCGGG
AGGAGATGACCAAGAACCAGGTCAGCCTGTCCTGCGCCGTCAAAG
GCTTCTATCCCAGCGACATCGCCGTGGAGTGGGAGAGCAATGGGC
AGCCGGAGAACAACTACAAGACCACGCCTCCCGTGCTGGACTCCG
ACGGCTCCTTCTTCCTCGTGAGCAAGCTCACCGTGGACAAGAGCA
GATGGCAGCAGGGGAACGTCTTCTCATGCTCCGTGATGCATGAGG
CTCTGCACAACCGGTTCACGCAGAAGTCTCTCTCCCTGTCTCCGG
GAAAA
trispecific/bispecific Ab CD79b arm LC
SEQ ID NO: 1491
DIVMTQSPLSLSVTPGEPASISCRSSESLLDSEDGNTYLDWFL
QKPGQSPQLLIYTLSYRASGVPDRFSGSGSDTDFTLHISSLEAED
VGLYYCMQRMEFPLTFGQGTKVEIKRTVAAPSVFIFPPSDEQLKS
GTASVVCLLNNFYPREAKVQWKVDNALQSGNSQESVTEQDSKDST
YSLSSTLTLSKADYEKHKVYACEVTHQGLSSPVTKSFNRGEC
trispecific/bispecific Ab CD79b arm LC
SEQ ID NO: 1492
GACATCGTGATGACCCAGTCTCCACTGAGCCTGTCTGTGACAC
CTGGCGAGCCTGCCTCCATCTCCTGTAGATCTTCTGAGTCCCTGC
TGGACAGCGAGGACGGCAATACCTACCTGGACTGGTTCCTGCAGA
AGCCCGGACAGTCTCCTCAGCTGCTGATCTACACCCTGTCCTACA
GAGCCTCTGGCGTGCCCGATAGATTCTCCGGCTCTGGCTCTGACA
CCGACTTTACCCTGCACATCTCCAGCCTGGAAGCCGAGGATGTGG
GCCTGTACTACTGTATGCAGCGGATGGAATTTCCCCTGACCTTCG
GCCAGGGCACCAAGGTGGAAATCAAGCGCACCGTGGCCGCCCCTA
GCGTGTTTATCTTCCCTCCCTCGGATGAGCAGCTTAAGTCAGGCA
CCGCATCCGTGGTCTGCCTGCTCAACAACTTCTACCCGAGGGAAG
CCAAAGTGCAGTGGAAAGTGGACAACGCGCTCCAGTCGGGAAACT
CCCAGGAGTCCGTGACCGAACAGGACTCCAAGGACAGCACTTATT
CCCTGTCCTCCACTCTGACGCTGTCAAAGGCCGACTACGAGAAGC
ACAAGGTCTACGCCTGCGAAGTGACCCATCAGGGGCTTTCCTCGC
CCGTGACTAAGAGCTTCAATCGGGGCGAATGC
trispecific/bispecific Ab CD79b arm HC
SEQ ID NO: 1493
QVQLQQSGPGLVKPSQTLSLTCAISGDSVSSNSATWNWIRQSP
SRGLEWLGRTYYRSKWYNDYTVSVKSRITINPDTSKNQFSLQLNS
VTPEDTAVYYCTRVDIAFDYWGQGTLVTVSSASTKGPSVFPLAPS
SKSTSGGTAALGCLVKDYFPEPVTVSWNSGALTSGVHTFPAVLQS
SGLYSLSSVVTVPSSSLGTQTYICNVNHKPSNTKVDKKVEPKSCD
KTHTCPPCPAPEAAGGPSVFLFPPKPKDTLMISRTPEVTCVVVSV
SHEDPEVKFNWYVDGVEVHNAKTKPREEQYNSTYRVVSVLTVLHQ
DWLNGKEYKCKVSNKALPAPIEKTISKAKGQPREPQVYTLPPSRE
EMTKNQVSLSCAVKGFYPSDIAVEWESNGQPENNYKTTPPVLDSD
GSFFLVSKLTVDKSRWQQGNVFSCSVMHEALHNRFTQKSLSLSPG
K
trispecific/bispecific Ab CD79b arm HC
SEQ ID NO: 1494
CAGGTTCAGCTGCAGCAGTCTGGCCCTGGACTGGTCAAGCCCT
CTCAGACCCTGTCTCTGACCTGTGCCATCTCCGGCGACTCCGTGT
CCTCTAATTCTGCCACCTGGAACTGGATCCGGCAGTCCCCTAGTA
GAGGCCTGGAATGGCTGGGCAGAACCTACTACCGGTCCAAGTGGT
ACAACGACTACACCGTGTCCGTGAAGTCCCGGATCACCATCAATC
CCGACACCTCCAAGAACCAGTTCTCCCTGCAGCTCAACAGCGTGA
CCCCTGAGGATACCGCCGTGTACTACTGCACCAGAGTGGATATCG
CCTTCGACTACTGGGGCCAGGGCACACTGGTTACCGTTTCTTCTG
CCTCCACCAAGGGCCCATCGGTCTTCCCCCTGGCACCCTCCTCCA
AGAGCACCTCTGGGGGCACAGCGGCCCTGGGCTGCCTGGTCAAGG
ACTACTTCCCCGAACCGGTGACGGTGTCGTGGAACTCAGGCGCCC
TGACCAGCGGCGTGCACACCTTCCCGGCTGTCCTACAGTCCTCAG
GACTCTACTCCCTCAGCAGCGTGGTGACCGTGCCCTCCAGCAGCT
TGGGCACCCAGACCTACATCTGCAACGTGAATCACAAGCCCAGCA
ACACCAAGGTGGACAAGAAAGTTGAGCCCAAATCTTGTGACAAAA
CTCACACATGCCCACCGTGCCCAGCACCTGAAGCCGCCGGGGGAC
CGTCAGTCTTCCTCTTCCCCCCAAAACCCAAGGACACCCTCATGA
TCTCCCGGACCCCTGAGGTCACATGCGTGGTGGTGAGCGTGAGCC
ACGAAGACCCTGAGGTCAAGTTCAACTGGTACGTGGACGGCGTGG
AGGTGCATAATGCCAAGACAAAGCCGCGGGAGGAGCAGTACAACA
GCACGTACCGTGTGGTCAGCGTCCTCACCGTCCTGCACCAGGACT
GGCTGAATGGCAAGGAGTACAAGTGCAAGGTGTCGAACAAAGCCC
TCCCAGCCCCCATCGAGAAAACCATCTCCAAAGCCAAAGGGCAGC
CCCGAGAACCACAGGTGTACACCCTGCCCCCATCCCGGGAGGAGA
TGACCAAGAACCAGGTCAGCCTGTCCTGCGCCGTCAAAGGCTTCT
ATCCCAGCGACATCGCCGTGGAGTGGGAGAGCAATGGGCAGCCGG
AGAACAACTACAAGACCACGCCTCCCGTGCTGGACTCCGACGGCT
CCTTCTTCCTCGTGAGCAAGCTCACCGTGGACAAGAGCAGATGGC
AGCAGGGGAACGTCTTCTCATGCTCCGTGATGCATGAGGCTCTGC
ACAACCGGTTCACGCAGAAGTCTCTCTCCCTGTCTCCGGGAAAA
trispecific/bispecific Ab CD79b arm LC
SEQ ID NO: 1495
QTVVTQPPSVSEAPRQRVTISCSGSSSNIGNHGVNWYQQLPGK
APKLLIYNDDLLPSGVSDRFSGSTSGTSGSLAISGLQSEDEADYY
CAAWDDSLNGVVFGGGTKLTVLGQPKAAPSVTLFPPSSEELQANK
ATLVCLISDFYPGAVTVAWKADSSPVKAGVETTTPSKQSNNKYAA
SSYLSLTPEQWKSHRSYSCQVTHEGSTVEKTVAPTECS
trispecific/bispecific Ab CD79b arm LC
SEQ ID NO: 1496
CAGACAGTGGTCACCCAGCCTCCATCTGTGTCTGAGGCCCCTA
GACAGAGAGTGACCATCTCCTGCTCCGGCTCCTCCTCCAACATCG
GCAATCATGGCGTGAACTGGTATCAGCAGCTGCCCGGCAAGGCTC
CCAAACTGCTGATCTACAACGACGACCTGCTGCCTTCTGGCGTGT
CCGACAGATTCTCCGGCTCTACCTCTGGCACCTCTGGATCCCTGG
CTATCTCTGGCCTGCAGTCTGAGGACGAGGCCGACTACTATTGTG
CCGCCTGGGACGATTCTCTGAACGGCGTTGTGTTTGGCGGAGGCA
CCAAGCTGACAGTGTTGGGACAGCCTAAGGCAGCCCCCTCCGTGA
CCCTGTTCCCGCCATCATCCGAAGAACTGCAGGCCAACAAGGCCA
CGCTCGTGTGCCTGATTTCCGACTTCTACCCGGGGGCCGTGACTG
TGGCCTGGAAGGCAGACTCAAGCCCTGTGAAGGCTGGCGTCGAGA
CTACCACCCCGTCGAAGCAATCCAACAACAAATACGCGGCGTCCA
GCTACCTGAGCCTGACCCCTGAGCAGTGGAAATCCCACCGGTCCT
ACTCGTGCCAAGTCACCCACGAGGGATCCACTGTGGAAAAGACCG
TGGCGCCGACTGAGTGTTCC
trispecific/bispecific Ab CD79b arm HC
SEQ ID NO: 1497
QVQLQESGPGLVKPSQTLSLTCTVSGVSISNYYWSWIRQPPGK
GLEWIGRISPSGRTNYNPSLKSRVTMSLDASKNQFSLKLSSVTAA
DTAVYYCARGEYSGTYSYSFDIWGQGTMVTVSSASTKGPSVFPLA
PSSKSTSGGTAALGCLVKDYFPEPVTVSWNSGALTSGVHTFPAVL
QSSGLYSLSSVVTVPSSSLGTQTYICNVNHKPSNTKVDKKVEPKS
CDKTHTCPPCPAPEAAGGPSVFLFPPKPKDTLMISRTPEVTCVVV
SVSHEDPEVKFNWYVDGVEVHNAKTKPREEQYNSTYRVVSVLTVL
HQDWLNGKEYKCKVSNKALPAPIEKTISKAKGQPREPQVYTLPPS
REEMTKNQVSLSCAVKGFYPSDIAVEWESNGQPENNYKTTPPVLD
SDGSFFLVSKLTVDKSRWQQGNVFSCSVMHEALHNRFTQKSLSLS
PGK
trispecific/bispecific Ab CD79b arm HC
SEQ ID NO: 1498
CAGGTTCAGCTGCAAGAGTCTGGCCCTGGCCTGGTCAAGCCCT
CTCAGACCCTGTCTCTGACCTGTACCGTGTCCGGCGTGTCCATCT
CCAACTACTACTGGTCCTGGATCCGGCAGCCTCCTGGCAAAGGAC
TGGAATGGATCGGCCGCATCTCTCCTTCTGGTCGCACCAACTACA
ACCCCAGCCTGAAAAGCAGAGTGACCATGTCTCTGGACGCCTCCA
AGAACCAGTTCTCCCTGAAGCTGTCCTCCGTGACCGCTGCTGATA
CCGCCGTGTACTACTGTGCCAGAGGCGAGTACTCCGGCACCTACT
CCTACAGCTTCGACATCTGGGGCCAGGGCACCATGGTCACAGTCT
CTTCTGCCTCCACCAAGGGCCCATCGGTCTTCCCCCTGGCACCCT
CCTCCAAGAGCACCTCTGGGGGCACAGCGGCCCTGGGCTGCCTGG
TCAAGGACTACTTCCCCGAACCGGTGACGGTGTCGTGGAACTCAG
GCGCCCTGACCAGCGGCGTGCACACCTTCCCGGCTGTCCTACAGT
CCTCAGGACTCTACTCCCTCAGCAGCGTGGTGACCGTGCCCTCCA
GCAGCTTGGGCACCCAGACCTACATCTGCAACGTGAATCACAAGC
CCAGCAACACCAAGGTGGACAAGAAAGTTGAGCCCAAATCTTGTG
ACAAAACTCACACATGCCCACCGTGCCCAGCACCTGAAGCCGCCG
GGGGACCGTCAGTCTTCCTCTTCCCCCCAAAACCCAAGGACACCC
TCATGATCTCCCGGACCCCTGAGGTCACATGCGTGGTGGTGAGCG
TGAGCCACGAAGACCCTGAGGTCAAGTTCAACTGGTACGTGGACG
GCGTGGAGGTGCATAATGCCAAGACAAAGCCGCGGGAGGAGCAGT
ACAACAGCACGTACCGTGTGGTCAGCGTCCTCACCGTCCTGCACC
AGGACTGGCTGAATGGCAAGGAGTACAAGTGCAAGGTGTCGAACA
AAGCCCTCCCAGCCCCCATCGAGAAAACCATCTCCAAAGCCAAAG
GGCAGCCCCGAGAACCACAGGTGTACACCCTGCCCCCATCCCGGG
AGGAGATGACCAAGAACCAGGTCAGCCTGTCCTGCGCCGTCAAAG
GCTTCTATCCCAGCGACATCGCCGTGGAGTGGGAGAGCAATGGGC
AGCCGGAGAACAACTACAAGACCACGCCTCCCGTGCTGGACTCCG
ACGGCTCCTTCTTCCTCGTGAGCAAGCTCACCGTGGACAAGAGCA
GATGGCAGCAGGGGAACGTCTTCTCATGCTCCGTGATGCATGAGG
CTCTGCACAACCGGTTCACGCAGAAGTCTCTCTCCCTGTCTCCGG
GAAAA
trispecific/bispecific Ab CD79b arm LC
SEQ ID NO: 1499
DIQMTQSPSSLSASVGDRVTITCRSSQSLFDSDDGNTYLDWFQ
QKPGQSPKLLIQTLSYRASGVPSRFSGSGSGTDFTLTISSLQPED
FATYYCMQRMEFPLTFGGGTKVEIKRTVAAPSVFIFPPSDEQLKS
GTASVVCLLNNFYPREAKVQWKVDNALQSGNSQESVTEQDSKDST
YSLSSTLTLSKADYEKHKVYACEVTHQGLSSPVTKSFNRGEC
trispecific/bispecific Ab CD79b arm LC
SEQ ID NO: 1500
GACATCCAGATGACCCAGTCTCCATCCTCTCTGTCCGCCTCTG
TGGGCGACAGAGTGACCATCACCTGTCGGTCCTCTCAGTCCCTGT
TCGACTCTGACGACGGCAACACCTACCTGGACTGGTTCCAGCAGA
AGCCCGGCCAGTCTCCTAAGCTGCTGATCCAGACACTGTCCTACA
GAGCCTCTGGCGTGCCCTCCAGATTTTCCGGCTCTGGCTCTGGCA
CCGACTTTACCCTGACAATCTCCAGCCTGCAGCCTGAGGACTTCG
CCACCTACTACTGTATGCAGCGGATGGAATTTCCCCTGACCTTCG
GCGGAGGCACCAAGGTGGAAATCAAGCGCACCGTGGCCGCCCCTA
GCGTGTTTATCTTCCCTCCCTCGGATGAGCAGCTTAAGTCAGGCA
CCGCATCCGTGGTCTGCCTGCTCAACAACTTCTACCCGAGGGAAG
CCAAAGTGCAGTGGAAAGTGGACAACGCGCTCCAGTCGGGAAACT
CCCAGGAGTCCGTGACCGAACAGGACTCCAAGGACAGCACTTATT
CCCTGTCCTCCACTCTGACGCTGTCAAAGGCCGACTACGAGAAGC
ACAAGGTCTACGCCTGCGAAGTGACCCATCAGGGGCTTTCCTCGC
CCGTGACTAAGAGCTTCAATCGGGGCGAATGC
trispecific/bispecific Ab CD79b arm LC
SEQ ID NO: 1501
GACATCCAGATGACCCAGAGCCCTAGCAGCCTGAGCGCCAGCG
TGGGCGACAGAGTGACCATTACCTGCAGAAGCAGCCAGAGCCTGT
TCGACAGCGACGACGGCAATACCTACCTGGACTGGTTCCAGCAGA
AGCCTGGCCAGAGCCCTAAGCTGCTGATCCAGACCCTGAGCTACA
GAGCCAGCGGCGTGCCTAGCAGATTCTCCGGCAGCGGCTCCGGCA
CCGACTTCACCCTGACCATCAGCAGCCTGCAGCCTGAGGACTTCG
CCACCTACTACTGCATGCAGAGAATGGAGTTCCCTCTGACCTTCG
GCGGCGGCACCAAGGTGGAGATCAAGCGTACGGTGGCTGCACCAT
CTGTCTTCATCTTCCCGCCATCTGATGAGCAGTTGAAATCTGGAA
CTGCCTCTGTTGTGTGCCTGCTGAATAACTTCTATCCCAGAGAGG
CCAAAGTACAGTGGAAGGTGGATAACGCCCTCCAATCGGGTAACT
CCCAGGAGAGTGTCACAGAGCAGGACAGCAAGGACAGCACCTACA
GCCTCAGCAGCACCCTGACGCTGAGCAAAGCAGACTACGAGAAAC
ACAAAGTCTACGCCTGCGAAGTCACCCATCAGGGCCTGAGCTCGC
CCGTCACAAAGAGCTTCAACAGGGGAGAGTGT
trispecific/bispecific Ab CD79b arm HC
SEQ ID NO: 1502
QVQLQESGPGLVKPSQTLSLTCTVSGVSISNYYWSWIRQPPGK
GLEWIGRISPSGRTNYNPSLKSRVTMSLDASKNQFSLKLSSVTAA
DTAVYYCARGEYSGTYSYSFDIWGQGTMVTVSSASTKGPSVFPLA
PSSKSTSGGTAALGCLVKDYFPEPVTVSWNSGALTSGVHTFPAVL
QSSGLYSLSSVVTVPSSSLGTQTYICNVNHKPSNTKVDKKVEPKS
CDKTHTCPPCPAPEAAGGPSVFLFPPKPKDTLMISRTPEVTCVVV
SVSHEDPEVKFNWYVDGVEVHNAKTKPREEQYNSTYRVVSVLTVL
HQDWLNGKEYKCKVSNKALPAPIEKTISKAKGQPREPQVYTLPPS
REEMTKNQVSLWCLVKGFYPSDIAVEWESNGQPENNYKTTPPVLD
SDGSFFLYSKLTVDKSRWQQGNVFSCSVMHEALHNHYTQKSLSLS
PGK
trispecific/bispecific Ab CD79b arm HC
SEQ ID NO: 1503
CAGGTTCAGCTGCAAGAGTCTGGCCCTGGCCTGGTCAAGCCCT
CTCAGACCCTGTCTCTGACCTGTACCGTGTCCGGCGTGTCCATCT
CCAACTACTACTGGTCCTGGATCCGGCAGCCTCCTGGCAAAGGAC
TGGAATGGATCGGCCGCATCTCTCCTTCTGGTCGCACCAACTACA
ACCCCAGCCTGAAAAGCAGAGTGACCATGTCTCTGGACGCCTCCA
AGAACCAGTTCTCCCTGAAGCTGTCCTCCGTGACCGCTGCTGATA
CCGCCGTGTACTACTGTGCCAGAGGCGAGTACTCCGGCACCTACT
CCTACAGCTTCGACATCTGGGGCCAGGGCACCATGGTCACAGTCT
CTTCTGCCTCCACCAAGGGCCCATCGGTCTTCCCCCTGGCACCCT
CCTCCAAGAGCACCTCTGGGGGCACAGCGGCCCTGGGCTGCCTGG
TCAAGGACTACTTCCCCGAACCGGTGACGGTGTCGTGGAACTCAG
GCGCCCTGACCAGCGGCGTGCACACCTTCCCGGCTGTCCTACAGT
CCTCAGGACTCTACTCCCTCAGCAGCGTGGTGACCGTGCCCTCCA
GCAGCTTGGGCACCCAGACCTACATCTGCAACGTGAATCACAAGC
CCAGCAACACCAAGGTGGACAAGAAAGTTGAGCCCAAATCTTGTG
ACAAAACTCACACATGCCCACCGTGCCCAGCACCTGAAGCCGCCG
GGGGACCGTCAGTCTTCCTCTTCCCCCCAAAACCCAAGGACACCC
TCATGATCTCCCGGACCCCTGAGGTCACATGCGTGGTGGTGAGCG
TGAGCCACGAAGACCCTGAGGTCAAGTTCAACTGGTACGTGGACG
GCGTGGAGGTGCATAATGCCAAGACAAAGCCGCGGGAGGAGCAGT
ACAACAGCACGTACCGTGTGGTCAGCGTCCTCACCGTCCTGCACC
AGGACTGGCTGAATGGCAAGGAGTACAAGTGCAAGGTGTCGAACA
AAGCCCTCCCAGCCCCCATCGAGAAAACCATCTCCAAAGCCAAAG
GGCAGCCCCGAGAACCACAGGTGTACACCCTGCCCCCATCCCGGG
AGGAGATGACCAAGAACCAGGTCAGCCTGTGGTGCCTGGTCAAAG
GCTTCTATCCCAGCGACATCGCCGTGGAGTGGGAGAGCAATGGGC
AGCCGGAGAACAACTACAAGACCACGCCTCCCGTGCTGGACTCCG
ACGGCTCCTTCTTCCTCTACAGCAAGCTCACCGTGGACAAGAGCA
GATGGCAGCAGGGGAACGTCTTCTCATGCTCCGTGATGCATGAGG
CTCTGCACAACCACTACACGCAGAAGTCTCTCTCCCTGTCTCCGG
GAAAA
trispecific/bispecific Ab CD79b arm LC
SEQ ID NO: 1499
DIQMTQSPSSLSASVGDRVTITCRSSQSLFDSDDGNTYLDWFQ
QKPGQSPKLLIQTLSYRASGVPSRFSGSGSGTDFTLTISSLQPED
FATYYCMQRMEFPLTFGGGTKVEIKRTVAAPSVFIFPPSDEQLKS
GTASVVCLLNNFYPREAKVQWKVDNALQSGNSQESVTEQDSKDST
YSLSSTLTLSKADYEKHKVYACEVTHQGLSSPVTKSFNRGEC

[1051] Table 32 provides a summary of examples of some CD79b×CD3 bispecific antibodies described herein.

TABLE 32
Exemplary CD79b × CD3 bispecific antibodies

| | | HC1 | | LC | | | HC2 | |
|---|---|---|---|---|---|---|---|---|
| | | amino | HC1 | amino | | | amino | HC2 |
| | | acid | DNA | acid | LC DNA | | acid | DNA |
| | HC1/LC | sequence | sequence | sequence | sequence | | sequence | sequence |
| | (CD79b | SEQ ID | SEQ ID | SEQ ID | SEQ ID | HC2 | SEQ ID | SEQ ID |
| ID | arm) | NO | NO | NO | NO | (CD3-arm) | NO | NO |
| 79C3B601 | CD9B374 | 1489 | 1490 | 1491 | 1492 | CD3B2030- | 1504 | 1505 |
| | | | | | | N106A | | |
| 79C3B646 | CD9B330- | 1493 | 1494 | 1495 | 1496 | CD3B2030- | 1504 | 1505 |
| | N31S | | | | | N106A | | |
| 79C3B651 | CD9B643 | 1497 | 1498 | 1499 | 1500 | CD3B2030- | 1504 | 1505 |
| | | | | | | N106A | | |
| 79C3B605 | CD9B374 | 1489 | 1490 | 1491 | 1492 | CD3B2089- | 1506 | 1507 |
| | | | | | | N106G | | |
| 79C3B645 | CD9B330- | 1493 | 1494 | 1495 | 1496 | CD3B2089- | 1506 | 1507 |
| | N31S | | | | | N106G | | |
| 79C3B650 | CD9B643 | 1497 | 1498 | 1499 | 1500 | CD3B2089- | 1506 | 1507 |
| | | | | | | N106G | | |

bispecific Ab CD3-arm
SEQ ID NO: 1504
EIVLTQSPATLSASPGERVTLSCSASSSVSYMNWYQQKPGQAPRRWIYDSSKLASGVPARFSGSGSGRDYTLT
ISSLEPEDFAVYYCQQWSRNPPTFGGGTKVEIKGGSEGKSSGSGSESKSTGGSQVQLVQSGAEVKKPGSSVKV
SCKASGYTFTRSTMHWVKQAPGQGLEWIGYINPSSAYTNYNQKFQGRVTLTADKSTSTAYMELSSLRSEDTAV
YYCASPQVHYDYAGFPYWGQGTLVTVSSEPKSSDKTHTCPPCPAPEAAGGPSVFLFPPKPKDTLMISRTPEVT
CVVVSVSHEDPEVKFNWYVDGVEVHNAKTKPREEQYNSTYRVVSVLTVLHQDWLNGKEYKCKVSNKALPAPIE
KTISKAKGQPREPQVYTLPPSREEMTKNQVSLWCLVKGFYPSDIAVEWESNGQPENNYKTTPPVLDSDGSFFL
YSKLTVDKSRWQQGNVFSCSVMHEALHNHYTQKSLSLSPGK
bispecific Ab CD3-arm
SEQ ID NO: 1505
GAGATCGTGCTGACCCAGTCTCCTGCCACACTGAGTGCTTCTCCAGGCGAGAGAGTGACCCTGTCCTGCTCCG
CTTCCTCCTCCGTGTCCTACATGAACTGGTATCAGCAGAAGCCCGGCCAGGCTCCTCGGAGATGGATCTACGA
CTCTTCCAAGCTGGCCTCTGGTGTGCCAGCCAGATTTTCTGGCTCTGGCTCCGGCAGAGACTATACCCTGACC
ATCTCCAGCCTGGAACCTGAGGACTTCGCCGTGTACTACTGCCAGCAGTGGTCTAGGAACCCTCCTACCTTTG
GCGGAGGCACCAAGGTGGAAATCAAGGGCGGATCTGAGGGAAAGTCCAGCGGCTCCGGCAGCGAAAGCAAGTC
CACCGGCGGAAGCCAGGTTCAACTGGTTCAGTCTGGCGCCGAAGTGAAGAAACCTGGCTCCTCCGTCAAGGTG
TCCTGCAAGGCTTCCGGCTACACCTTTACCAGATCCACCATGCACTGGGTCAAGCAGGCCCCTGGACAAGGCT
TGGAGTGGATCGGCTACATCAACCCCAGCTCCGCCTACACCAACTACAACCAGAAATTCCAGGGCAGAGTGAC
CCTGACCGCCGACAAGTCTACCTCCACCGCCTACATGGAACTGTCCAGCCTGAGATCTGAGGACACCGCCGTG
TACTACTGCGCCTCTCCTCAGGTCCACTACGACTACGCCGGCTTTCCTTATTGGGGCCAGGGCACACTGGTCA
CCGTTTCTTCTGAGCCCAAATCTAGCGACAAAACTCACACATGCCCACCGTGCCCAGCACCTGAAGCCGCCGG
GGGACCGTCAGTCTTCCTCTTCCCCCCAAAACCCAAGGACACCCTCATGATCTCCCGGACCCCTGAGGTCACA
TGCGTGGTGGTGAGCGTGAGCCACGAAGACCCTGAGGTCAAGTTCAACTGGTACGTGGACGGCGTGGAGGTGC
ATAATGCCAAGACAAAGCCGCGGGAGGAGCAGTACAACAGCACGTACCGTGTGGTCAGCGTCCTCACCGTCCT
GCACCAGGACTGGCTGAATGGCAAGGAGTACAAGTGCAAGGTGTCGAACAAAGCCCTCCCAGCCCCCATCGAG
AAAACCATCTCCAAAGCCAAAGGGCAGCCCCGAGAACCACAGGTGTACACCCTGCCCCCATCCCGGGAGGAGA
TGACCAAGAACCAGGTCAGCCTGTGGTGCCTGGTCAAAGGCTTCTATCCCAGCGACATCGCCGTGGAGTGGGA
GAGCAATGGGCAGCCGGAGAACAACTACAAGACCACGCCTCCCGTGCTGGACTCCGACGGCTCCTTCTTCCTC
TACAGCAAGCTCACCGTGGACAAGAGCAGATGGCAGCAGGGGAACGTCTTCTCATGCTCCGTGATGCATGAGG
CTCTGCACAACCACTACACGCAGAAGTCTCTCTCCCTGTCTCCGGGAAAA
SEQ ID NO: 1506 bispecific Ab CD3 arm
EIVLTQSPATLSASPGERVTLSCSASSSVSYMNWYQQKPGQAPRRWIYDSSKLASGVPARFSGSGSGRDYTLT
ISSLEPEDFAVYYCQQWSRNPPTFGGGTKVEIKGGSEGKSSGSGSESKSTGGSQVQLVQSGAEVKKPGSSVKV
SCKASGYTFTRSTMHWVRQAPGQGLEWMGYINPSSAYTNYAQKFQGRVTLTADKSTSTAYMELSSLRSEDTAV
YYCASPQVHYDYGGFPYWGQGTLVTVSSEPKSSDKTHTCPPCPAPEAAGGPSVFLFPPKPKDTLMISRTPEVT
CVVVSVSHEDPEVKFNWYVDGVEVHNAKTKPREEQYNSTYRVVSVLTVLHQDWLNGKEYKCKVSNKALPAPIE
KTISKAKGQPREPQVYTLPPSREEMTKNQVSLWCLVKGFYPSDIAVEWESNGQPENNYKTTPPVLDSDGSFFL
YSKLTVDKSRWQQGNVFSCSVMHEALHNHYTQKSLSLSPGK
bispecific Ab CD3 arm
SEQ ID NO: 1507
GAGATCGTGCTGACCCAGTCTCCTGCCACACTGAGTGCTTCTCCAGGCGAGAGAGTGACCCTGTCCTGCTCCG
CTTCCTCCTCCGTGTCCTACATGAACTGGTATCAGCAGAAGCCCGGCCAGGCTCCTCGGAGATGGATCTACGA
CTCTTCCAAGCTGGCCTCTGGTGTGCCAGCCAGATTTTCTGGCTCTGGCTCCGGCAGAGACTATACCCTGACC
ATCTCCAGCCTGGAACCTGAGGACTTCGCCGTGTACTACTGCCAGCAGTGGTCTAGGAACCCTCCTACCTTTG
GCGGAGGCACCAAGGTGGAAATCAAGGGCGGATCTGAGGGAAAGTCCAGCGGCTCCGGCAGCGAAAGCAAGTC
CACCGGCGGAAGCCAGGTTCAACTGGTTCAGTCTGGCGCCGAAGTGAAGAAACCTGGCTCCTCCGTGAAAGTG
TCCTGCAAGGCTTCCGGCTACACTTTTACCAGATCCACCATGCACTGGGTCCGACAGGCTCCAGGACAAGGCT
TGGAGTGGATGGGCTACATCAACCCCAGCTCCGCCTACACCAACTACGCCCAGAAATTCCAGGGCAGAGTGAC
CCTGACCGCCGACAAGTCTACCTCCACCGCCTACATGGAACTGTCCAGCCTGAGATCTGAGGACACCGCCGTG
TACTACTGCGCTTCTCCTCAGGTGCACTACGACTACGGCGGCTTTCCTTATTGGGGCCAGGGCACACTGGTCA
CCGTTTCTTCTGAGCCCAAATCTAGCGACAAAACTCACACATGCCCACCGTGCCCAGCACCTGAAGCCGCCGG
GGGACCGTCAGTCTTCCTCTTCCCCCCAAAACCCAAGGACACCCTCATGATCTCCCGGACCCCTGAGGTCACA
TGCGTGGTGGTGAGCGTGAGCCACGAAGACCCTGAGGTCAAGTTCAACTGGTACGTGGACGGCGTGGAGGTGC
ATAATGCCAAGACAAAGCCGCGGGAGGAGCAGTACAACAGCACGTACCGTGTGGTCAGCGTCCTCACCGTCCT
GCACCAGGACTGGCTGAATGGCAAGGAGTACAAGTGCAAGGTGTCGAACAAAGCCCTCCCAGCCCCCATCGAG
AAAACCATCTCCAAAGCCAAAGGGCAGCCCCGAGAACCACAGGTGTACACCCTGCCCCCATCCCGGGAGGAGA
TGACCAAGAACCAGGTCAGCCTGTGGTGCCTGGTCAAAGGCTTCTATCCCAGCGACATCGCCGTGGAGTGGGA
GAGCAATGGGCAGCCGGAGAACAACTACAAGACCACGCCTCCCGTGCTGGACTCCGACGGCTCCTTCTTCCTC
TACAGCAAGCTCACCGTGGACAAGAGCAGATGGCAGCAGGGGAACGTCTTCTCATGCTCCGTGATGCATGAGG
CTCTGCACAACCACTACACGCAGAAGTCTCTCTCCCTGTCTCCGGGAAAA

[1052] The antibodies were expressed in ExpiCHO-S™ cells (ThermoFisher Scientific; Waltham, Mass., Cat #A29127) by transient transfection with purified plasmid DNA following the manufacturer's recommendations. Briefly, ExpiCHO-S™ cells were maintained in suspension in ExpiCHO™ expression medium (ThermoFisher Scientific, Cat #A29100) in an orbital shaking incubator set at 37° C., 8% CO₂ and 125 RPM. The cells were passaged and diluted prior to transfection to 6.0×10⁶ cells per ml, maintaining cell viability at 99.0% or better. Transient transfections were done using the ExpiFectamine™ CHO transfection kit (ThermoFisher Scientific, Cat #A29131). For each ml of diluted cells to be transfected, 0.5 microgram of bispecific encoding DNA (HC1:HC2:LC=1:2:2) and 0.5 microgram of pAdVAntage DNA (Promega, Cat #E1711) was used and diluted into OptiPRO™ SFM complexation medium. ExpiFectamine™ CHO reagent was used at a 1:4 ratio (v/v, DNA:reagent) and diluted into OptiPRO™. The diluted DNA and transfection reagent were combined for one minute, allowing DNA/lipid complex formation, and then added to the cells. After overnight incubation, ExpiCHO™ feed and ExpiFectamine™ CHO enhancers were added to the cells as per the manufacturer's Standard protocol. Cells were incubated with orbital shaking (125 rpm) at 37° C. for seven days prior to harvesting the culture broth. The culture supernatant from the transiently transfected ExpiCHO-S™ cells was clarified by centrifugation (30 min, 3000 rcf) followed by filtration (0.2 μm PES membrane, Corning; Corning, N.Y.).

[1053] The filtered cell culture supernatant was loaded onto a pre-equilibrated (1×DPBS, pH 7.2) Mab Select Sure Protein A column (GE Healthcare) using an AKTAXpress chromatography system. After loading, the column was washed with 10 column volumes of 1×DPBS, pH7.2. The protein was eluted with 10 column volumes of 0.1 M sodium (Na)-Acetate, pH 3.5. Protein fractions were neutralized immediately by the addition of 2.5 M Tris HCl, pH 7.2 to 20% (v/v) of the elution fraction volume. Peak fractions were pooled and loaded onto a CH1 column (Thermofisher). After loading, the column was washed with 10 column volumes of 1×DPBS, pH7.2. The protein was eluted with 10 column volumes of 0.1 M sodium (Na)-Acetate, pH 3.5. Protein fractions were partially neutralized by the addition of 2.5 M Tris HCl, pH 7.2 to 15% (v/v) of the final volume. The high molecular weight species were removed by preparative size exclusion chromatography (SEC) using Superdex 200 (GE Healthcare). Post sample injection, the column was developed with 1×DPBS and the major peak fractions were pooled, dialyzed into 10 mM Histidine, pH6.5 and filtered (0.2 μm).

[1054] The concentration of purified protein was determined by absorbance at 280 nm on a Dropsense spectrophotometer. The quality of the purified protein was assessed by cSDS and analytical size exclusion HPLC (Agilent HPLC system). The endotoxin level was measured using a turbidometric LAL assay (Pyrotell®-T, Associates of Cape Cod; Falmouth, Mass.).

### Example 4: Bispecific and Trispecific Antibodies Binding Characterization

[1055] Binding of Bispecific CD79×CD3 Antibodies on CD79⁺ Target Cells

[1056] The binding affinity of the CD79b binding arm of the CD79×CD3 bispecific molecules were assessed using cell lines that were validated by flow cytometry to have different endogenous expression levels of CD79b on the cell surface, shown in Table 33.

TABLE 33
CD79b Antigen Density of B Lymphoma Cell Lines

| | | CD79b Antigen |
|---|---|---|
| | | Density (Antigen |
| Cell Line | Cell Type | Number/cell) |
| HBL-1 | Diffuse large B-cell lymphoma line | 429,649 |
| OCI-LY-10 | Diffuse large B-cell lymphoma line | 38,885 |
| CARNAVAL | Diffuse large B-cell lymphoma line | 98,176 |
| WILL2 | Diffuse large B-cell lymphoma line | 3,824 |

[1057] Diffuse large B-cell lymphoma cell lines were incubated for 1 hour with CD79b×CD3 test molecules 79C3B646, 79C3B651, and 79C3B601 (1 uM starting concentration at 1:3 serial dilutions) at 37° C. All cells were washed with BD stain buffer (BD Biosciences; Cat #554657), centrifuged at 1200 RPM for 3 mins, with supernatant discarded. Cells were then stained for 20 minutes at 4° C. with BD stain buffer containing AlexaFluor 647 labeled anti-human IgG secondary antibody (Jackson Immuno; Cat #109-606-098) at a 1:200 dilution along with Aqua Fixable Live/Dead stain (Invitrogen; Cat #L34957) at a 1:400 dilution. All cells were washed with BD stain buffer (BD Biosciences; Cat #554657), centrifuged at 1200 RPM for 3 minutes, with supernatant discarded. Cells were analyzed using Intellicyt (Sartorius) flow cytometer and mean fluorescent intensity (MFI) was generated using Forcyt software (Sartorius). MFI was graphed and EC50 values generated using GraphPad PRISM v.8. Dose response curves were generated by transforming the x axis values using the formula x=lox. Data were then graphed using non-linear regression curve fit analysis “log(agonist) vs. response-variable slope (four parameter)”.

[1058] All CD79b×CD3 molecules showed good binding on cell lines expressing endogenous CD79b on the cell surface, with the CD79b binding arm of construct 79C3B651 showing the highest binding affinity across all tested cell lines, shown in FIGS. 7A-7D and Table 34.

TABLE 34
CD79b × CD3 Bispecifics Cell Binding EC50 Values

| | HBL-1 | OCI-LY10 | Carnaval | WILL-2 |
|---|---|---|---|---|
| | EC50 | EC50 | EC50 | EC50 |
| | (nM) | (nM) | (nM) | (nM) |
| 79C3B646 | 97 | undetermined | 44 | undetermined |
| 79C3B651 | 15 | undetermined | 12 | undetermined |
| 79C3B601 | 48 | undetermined | 89 | undetermined |

[1059] Binding of Trispecific CD79×CD20×CD3 Antibodies on CD79b⁺ and CD20⁺ Target Cells

[1060] The binding affinity of the CD79b binding arm of the CD79×CD20×CD3 trispecific molecules as well as control CD79b×CD3 and Null×CD20×CD3 were assessed using cell lines that were validated by flow cytometry to have different endogenous expression levels of CD79b and CD20 on the cell surface, shown in Table 35.

TABLE 35
CD79b and CD20 Antigen Density of B Lymphoma Cell Lines

| | | | CD20 Antigen |
|---|---|---|---|
| | | CD79b Antigen | Density |
| | | Density (Antigen | (Antigen |
| Cell Line | Cell Type | Number/cell) | Number/cell) |
| HBL-1 | Diffuse large B-cell | 429,649 | 73,467 |
| | lymphoma line | | |
| OCI-LY-10 | Diffuse large B-cell | 38,885 | 67,352 |
| | lymphoma line | | |
| CARNAVAL | Diffuse large B-cell | 98,176 | 118,789 |
| | lymphoma line | | |
| WILL2 | Diffuse large B-cell | 3,824 | 314 |
| | lymphoma line | | |

[1061] Diffuse large B-cell lymphoma cell lines were incubated for 1 hour with CD79b×CD20×CD3 test molecules C923B74, C923B99, and C923B38; CD79×CD3 test molecules 79C3B646, 79C3B651, and 79C3B601 and Null×CD20×CD3 control molecule C923B98 (1 μM starting concentration at 1:3 serial dilutions) at 37° C. All cells were washed with BD stain buffer (BD Biosciences; Cat #554657), centrifuged at 1200 RPM for 3 minutes, with supernatant discarded. Cells were then stained for 20 minutes at 4° C. with BD stain buffer containing AlexaFluor 647 labeled anti-human IgG secondary antibody (Jackson Immuno; Cat #109-606-098) at a 1:200 dilution along with Aqua Fixable Live/Dead stain (Invitrogen; Cat #L34957) at a 1:400 dilution. All cells were washed with BD stain buffer (BD Biosciences; Cat #554657), centrifuged at 1200 RPM for 3 mins, with supernatant discarded. Cells were analyzed using Intellicyt (Sartorius) flow cytometer and mean fluorescent intensity (MFI) was generated using Forcyt software (Sartorius). MFI was graphed and EC50 values generated using GraphPad PRISM v.8. Dose response curves were generated by transforming the x axis values using the formula x=lox. Data was then graphed using non-linear regression curve fit analysis “log(agonist) vs. response-variable slope (four parameter)”.

[1062] All CD79b×CD20×CD3 molecules showed good binding on cell lines expressing endogenous CD79b and CD20 on the cell surface, with some trispecific constructs showing better binding affinity across cell lines when compared to binding of CD79b×CD3 and CD20×CD3 control molecules, shown in FIGS. 8A-8D and Table A-10. The CD79b binding arm of trispecific construct C923B99 showed the highest binding affinity across all tested cell lines, shown in FIGS. 8A-8D and Table 36.

TABLE 36
CD79b × CD20 × CD3 Trispecific Cell Binding EC50 Values

| | HBL-1 | OCI-LY10 | Carnaval | |
|---|---|---|---|---|
| | EC50 | EC50 | EC50 | WILL-2 EC50 |
| | (nM) | (nM) | (nM) | (nM) |
| C923B38 | 43 | 12 | 16 | undetermined |
| C923B74 | 52 | 66 | 23 | undetermined |
| C923B99 | 8 | 2 | 6 | undetermined |
| 79C3B646 | 97 | undetermined | 44 | undetermined |
| 79C3B651 | 15 | undetermined | 12 | undetermined |
| 79C3B601 | 48 | undetermined | 89 | undetermined |
| C923B98 | undetermined | undetermined | Undetermined | undetermined |

[1063] Kinetic Cell Binding of Bispecific CD79×CD3 Antibodies on CD79⁺ Target Cells

[1064] The binding kinetics of the CD79b binding arm of the CD79×CD3 bispecific molecules were assessed over a time course using cell lines that were validated by flow cytometry to have different endogenous expression levels of CD79b on the cell surface, shown in Table 37.

TABLE 37
CD79b Antigen Density of B Lymphoma Cell Lines

| | | CD79b Antigen |
|---|---|---|
| | | Density (Antigen |
| Cell Line | Cell Type | Number/cell) |
| HBL-1 | Diffuse large B-cell | 429,649 |
| | lymphoma line | |
| OCI-LY10 | Diffuse large B-cell | 38,885 |
| | lymphoma line | |
| CARNAVAL | Diffuse large B-cell | 98,176 |
| | lymphoma line | |

[1065] Diffuse large B-cell lymphoma cell lines were incubated for 1, 3, 24, and 48 hours with CD79b×CD3 test molecules 79C3B646, 79C3B651, and 79C3B601 (300 nM, 60 nM, 12 nM) at 37° C. At each time point, cells were washed with BD stain buffer (BD Biosciences; Cat #554657), centrifuged at 1200 RPM for 3 mins, with supernatant discarded. Cells were then stained for 30 minutes at 4° C. with BD stain buffer containing AlexaFluor 647 labeled anti-human IgG secondary antibody (Jackson Immuno; Cat #109-606-098) at a 1:200 dilution. All cells were washed with BD stain buffer (BD Biosciences; Cat #554657), centrifuged at 1200 RPM for 3 mins, with supernatant discarded. Cells were resuspended in 50ul of FACS buffer containing a 1:1000 dilution of Cytox Green viability dye (Invitrogen, Cat #S34860). Cells were analyzed using Intellicyt (Sartorius) flow cytometer and mean fluorescent intensity (MFI) was generated using Forcyt software (Sartorius). MFI was graphed and EC50 values generated using GraphPad PRISM v.8.

[1066] All CD79b×CD3 bispecific constructs showed steady CD79b binding kinetics with minimal loss of signal over time, as shown in FIGS. 9A-9I. 79C3B651 showed superior binding kinetics and the least amount of signal loss over time, shown in FIGS. 9A-9I.

[1067] Kinetic Cell Binding of Trispecific CD79×CD20×CD3 Antibodies on CD79b⁺ and CD20⁺ Target Cells

[1068] The binding kinetics of the CD79b and CD20 binding arms of the CD79×CD20×CD3 trispecific molecules were assessed over a time course using cell lines that were validated by flow cytometry to have different endogenous expression levels of CD79b and CD20 on the cell surface, shown in Table 38.

TABLE 38
CD79b and CD20 Antigen Density of B Lymphoma Cell Lines

| | | CD79b Antigen | CD20 Antigen |
|---|---|---|---|
| | | Density (Antigen | Density (Antigen |
| Cell Line | Cell Type | Number/cell) | Number/cell) |
| HBL-1 | Diffuse large B-cell | 429,649 | 73,467 |
| | lymphoma line | | |
| OCI-LY-10 | Diffuse large B-cell | 38,885 | 67,352 |
| | lymphoma line | | |
| CARNAVAL | Diffuse large B-cell | 98,176 | 118,789 |
| | lymphoma line | | |

[1069] Diffuse large B-cell lymphoma cell lines were incubated for 1, 3, 24, and 48 hours with CD79b×CD20×CD3 test molecules C923B74, C923B99, and C923B38; CD79×CD3 test molecules 79C3B646, 79C3B651, and 79C3B601 and Null×CD20×CD3 control molecule C923B98 (300 nM, 60 nM, 12 nM) at 37° C. At each time point, cells were washed with BD stain buffer (BD Biosciences; Cat #554657), centrifuged at 1200 RPM for 3 mins, with supernatant discarded. Cells were then stained for 30 minutes at 4° C. with BD stain buffer containing AlexaFluor 647 labeled anti-human IgG secondary antibody (Jackson Immuno; Cat #109-606-098) at a 1:200 dilution. All cells were washed with BD stain buffer (BD Biosciences; Cat #554657), centrifuged at 1200 RPM for 3 mins, with supernatant discarded. Cells were resuspended in 50ul of FACS buffer containing a 1:1000 dilution of Cytox Green viability dye (Invitrogen, Cat #S34860). Cells were analyzed using Intellicyt (Sartorius) flow cytometer and mean fluorescent intensity (MFI) was generated using Forcyt software (Sartorius). MFI was graphed and EC50 values generated using GraphPad PRISM v.8.

[1070] All CD79b×CD20×CD3 bispecific constructs showed steady CD79b binding kinetics with minimal loss of signal over time, shown in FIGS. 10A-10I. Trispecific construct C923B99 and bispecific construct 79C3B651, which both have the same CD79b and CD20 binding arms, showed superior binding kinetics and the least amount of signal loss over time, shown in FIGS. 10A-10I.

[1071] Binding of Bispecific CD79×CD3 Antibodies and Trispecific CD79×CD20×CD3 Antibodies on Pan T-Cells

[1072] Binding of the CD3 arm of CD79×CD3 bispecific and CD79b×CD20×CD3 trispecific constructs was assessed using cryo-preserved, negatively selected, primary human CD3⁺ pan T cells. Primary human CD3⁺ pan T cells from four different donors were incubated for 1 hour with CD79b×CD20×CD3 test molecules C923B74, C923B99, and C923B38 or CD79×CD3 test molecules 79C3B646, 79C3B651 (1 uM starting concentration at 1:3 serial dilutions) at 37° C. All cells were washed with BD stain buffer (BD Biosciences; Cat #554657), centrifuged at 1200 RPM for 3 mins, with supernatant discarded. Cells were then stained for 20 minutes at 4° C. with BD stain buffer containing AlexaFluor 647 labeled anti-human IgG secondary antibody (Jackson Immuno; Cat #109-606-098) at a 1:300 dilution. All cells were washed with BD stain buffer (BD Biosciences; Cat #554657), centrifuged at 1200 RPM for 3 mins, with supernatant discarded. Cells were resuspended in 50ul of FACS buffer containing a 1:1000 dilution of Cytox Green viability dye (Invitrogen, Cat #534860). Cells were analyzed using Intellicyt (Sartorius) flow cytometer and mean fluorescent intensity (MFI) was generated using Forcyt software (Sartorius). MFI was graphed using GraphPad PRISM v.8. Dose response curves were generated by transforming the x axis values using the formula x=lox. Data was then graphed using non-linear regression curve fit analysis “log(agonist) vs. response-variable slope (four parameter)”.

[1073] All CD79b×CD20×CD3 and CD79b×CD3 molecules showed moderate binding on all donor Pan T cells expressing endogenous CD3 on the cell surface, shown in FIGS. 11A-11D.

### Example 5: Functional Characterization: Antagonistic Activity of CD79×CD3 Bispecific and CD79×CD20×CD3 Trispecific Antibodies

[1074] Bispecific CD79×CD3 and Trispecific CD79×CD20×CD3 Mediated Cytotoxicity Against CD79b⁺ and CD79B⁻ Target Cells

[1075] mKATE2 DLBCL target cells were maintained in complete RPMI (ThermoFisher, catalog #11875093)1640 media containing 10% heat inactivated fetal bovine serum. Prior to the assay, antibodies were made at 3-fold serial dilutions in the at RPMI 1640 media containing 10% heat inactivated fetal bovine serum, at 4-fold expected final concentration. A volume of 50 μL of medium-diluted bsAb or trispecific Ab in each well of a 96-well plate were further diluted into 200 μL by adding a mix of target and effector cell suspension. The target cell lines were harvested by centrifuge at 400×g for 5 min, washed one time with phenol red-free RPMI 1640 media, counted and suspended in fresh complete phenol red-free RPMI 1640 media at 1×10⁶ cells/mL. Healthy donor T cells (isolated by CD3—negative selection provided by Discovery Life Sciences) were thawed in complete phenol red-free media (RPMI 1640 media containing 10% heat inactivated fetal bovine serum), counted and suspended in fresh complete phenol red-free RPMI 1640 media at 1×10⁶ cells/mL. Target cells and T cells were mixed to obtain 5:1 effector to target cell ratio. Cell suspension was added to antibody dilution wells according to plate layout (150 μL/well).

[1076] After mixing target and T cells with corresponding bsAb dilution, 80 μL from each well, containing 200 μl with 10000 target and 50000 T cells, were dispensed in a 384 well plate, in duplicate. Plates were sealed using a Breathe-Easy membrane seal. Next, co-cultures were placed in an IncuCyte ZOOM live-content imaging system, and images were automatically acquired in both phase and fluorescence channels every 6 hours for 3 to 6 days with a 4× objective lens (single whole well image). IncuCyte Zoom software was used to detect target cells based on mKATE2 expression using optimized process definition parameters. To measure the amount of target cells/well, the total red area was quantified, and raw values were exported in Excel (Microsoft Office). To quantify cancer cell killing over time, the average values for each replicate were pasted in Prism (GraphPad; version 7 for PC). Expansion indexes (EI) per timepoint were calculated by dividing value at Tx by TO. Growth inhibition (GI) was calculated by normalizing each timepoint to the value of the untreated well average at that timepoint. From the GI values, area under the curve (AUC) values were derived for each condition. After normalizing the AUC to the untreated control (target with effector), antibody concentrations were plotted against the AUC values as a dose response. EC50 values were generated using GraphPad PRISM v.8. Dose response curves were generated by transforming the x axis values using the formula x=lox. Data was then graphed using non-linear regression curve fit analysis “log(agonist) vs. response-variable slope (four parameter)”. Lead CD79b×CD3 bispecific antibodies and CD79b×CD20×CD3 trispecific antibodies (79C3B646, C923B74, 79C3B601, C923B38, 79C3B651, C923B99, 79C3B613, C923B98) were evaluated for cytotoxicity on HBL1 and OCI-Ly10 cells. IC50 (pM) values are listed in Table 39, Table 40, Table 41, and Table 42.

TABLE 39
HBL-1 killing Incucyte (Average of 2 independent experiments)

| Protein ID | CD79b | CD20 | CD3 | IC50 (pM) |
|---|---|---|---|---|
| 79C3B645 | CD9B330 | NA | CD3B2089 | 7189.0 |
| 79C3B646 | CD9B330 | NA | CD3B2030 | 257.4 |
| C923B73 | CD9B330 | C20B22 | CD3B2089 | 6805.0 |
| C923B74 | CD9B330 | C20B22 | CD3B2030 | 346.3 |
| 79C3B605 | CD9B374 | NA | CD3B2089 | 29549.0 |
| 79C3B601 | CD9B374 | NA | CD3B2030 | 203.9 |
| C923B36 | CD9B374 | C20B22 | CD3B2089 | 31040.0 |
| C923B38 | CD9B374 | C20B22 | CD3B2030 | 301.2 |
| 79C3B650 | CD9B643 | NA | CD3B2089 | 43314.0 |
| 79C3B651 | CD9B643 | NA | CD3B2030 | 32.5 |
| C923B95 | CD9B643 | C20B22 | CD3B2089 | 4891.0 |
| C923B99 | CD9B643 | C20B22 | CD3B2030 | 69.2 |

TABLE 40
OCI-Ly10 killing Incucyte (Average of 2 independent experiments)

| Protein ID | CD79b | CD20 | CD3 | IC50 (nM) |
|---|---|---|---|---|
| 79C3B645 | CD9B330 | NA | CD3B2089 | 18.0 |
| 79C3B646 | CD9B330 | NA | CD3B2030 | 18.3 |
| C923B73 | CD9B330 | C20B22 | CD3B2089 | 132.4 |
| C923B74 | CD9B330 | C20B22 | CD3B2030 | 25.6 |
| 79C3B605 | CD9B374 | NA | CD3B2089 | 54.3 |
| 79C3B601 | CD9B374 | NA | CD3B2030 | 11.7 |
| C923B36 | CD9B374 | C20B22 | CD3B2089 | 42.0 |
| C923B38 | CD9B374 | C20B22 | CD3B2030 | 8.0 |
| 79C3B650 | CD9B643 | NA | CD3B2089 | 7.0 |
| 79C3B651 | CD9B643 | NA | CD3B2030 | 4.7 |
| C923B95 | CD9B643 | C20B22 | CD3B2089 | 14.8 |
| C923B99 | CD9B643 | C20B22 | CD3B2030 | 5.6 |

TABLE 41
CARNAVAL killing (Incucyte)

| Protein ID | CD79b | CD20 | CD3 | IC50 (nM) |
|---|---|---|---|---|
| 79C3B646 | CD9B330 | NA | CD3B2030 | 1.393 |
| C923B74 | CD9B330 | C20B22 | CD3B2030 | 0.741 |
| 79C3B601 | CD9B374 | NA | CD3B2030 | 1.645 |
| C923B38 | CD9B374 | C20B22 | CD3B2030 | 0.465 |
| C923B99 | CD9B643 | C20B22 | CD3B2030 | 0.285 |

TABLE 42
Daudi killing (Incucyte)

| Protein ID | CD79b | CD20 | CD3 | IC50 (nM) |
|---|---|---|---|---|
| 79C3B646 | CD9B330 | NA | CD3B2030 | 0.597 |
| C923B74 | CD9B330 | C20B22 | CD3B2030 | 0.100 |
| 79C3B601 | CD9B374 | NA | CD3B2030 | 0.406 |
| C923B38 | CD9B374 | C20B22 | CD3B2030 | 0.071 |
| C923B99 | CD9B643 | C20B22 | CD3B2030 | < Cone tested |

[1077] FACS T Cell Killing Data on Panel of Target Positive (CD79b+ and CD20+) and Target Negative (CD79B− and CD20−) Cell Lines

[1078] Functional activity of the CD79b×CD3 bispecific and CD79b×CD20×CD3 trispecific constructs was assessed at 72 hr time point in an in vitro T cell killing assay by flow cytometry using cell lines that were validated by flow cytometry to have different endogenous expression levels of CD79b and CD20 on the cell surface, shown in Table 43.

TABLE 43
CD79b and CD20 Antigen Density of B Lymphoma Cell Lines

| | | | CD20 Antigen |
|---|---|---|---|
| | | CD79b Antigen | Density |
| | | Density (Antigen | (Antigen |
| Cell Line | Cell Type | Number/cell) | Number/cell) |
| HBL-1 | Diffuse large B-cell | 429,649 | 73,467 |
| | lymphoma line | | |
| OCI-LY10 | Diffuse large B-cell | 38,885 | 67,352 |
| | lymphoma line | | |
| CARNAVAL | Diffuse large B-cell | 98,176 | 118,789 |
| | lymphoma line | | |
| K562 | Chronic myelogenous | 0 | 0 |
| | leukemia | | |
| HEL | Erythroleukemia | 0 | 0 |

[1079] Target cancer cells were maintained in complete RPMI 1640 (ThermoFisher, catalog #11875093) media containing 10% heat inactivated fetal bovine serum. Prior to the assay, antibodies were made at 3-fold serial dilutions in RPMI 1640 media containing 10% heat inactivated fetal bovine serum, at 4-fold expected final concentration. A volume of 50 μL of medium-diluted bispecific or trispecific Ab in each well of a 96-well plate were further diluted into 200 μL by adding a mix of target and effector cell suspension. The target cell lines were harvested by centrifuge at 400×g for 5 min, washed one time with RPMI 1640 media. Target cancer cells were stain targets with CellTrace CFSE (ThermoFisher; Cat #: C34554) diluted 1/5000. Healthy donor T cells (isolated by CD3—negative selection provided by Discovery Life Sciences) were thawed in complete media (RPMI 1640 media containing 10% heat inactivated fetal bovine serum), counted and suspended in fresh complete phenol red-free RPMI 1640 media at 1×10⁶ cells/mL. Target cells and T cells were mixed to obtain 5:1 effector to target cell ratio. Cell suspension was added to antibody dilution wells according to plate layout (150 μL/well). Cells were incubated for 72 hours with CD79b×CD3 or CD79b×CD20x×CD3 test molecules (100 nM starting concentration at 1:3 serial dilutions) at 37° C. All cells were washed with BD stain buffer (BD Biosciences; Cat #554657), centrifuged at 1200 RPM for 3 minutes, with supernatant discarded. Cells were stained for 15 minutes at room temperature with Fixable Live/Dead stain (ThermoFisher; Cat #65-0865-14) at a 1:1000 dilution. All cells were washed with BD stain buffer (BD Biosciences; Cat #554657), centrifuged at 1200 RPM for 3 mins, with supernatant discarded. Cells were then stained for 30 minutes at 4° C. with BD stain buffer containing flow panel antibodies (Table 44), antibodies amount added as listed in the table. All cells were washed with BD stain buffer (BD Biosciences; Cat #554657), centrifuged at 1200 RPM for 3 mins, with supernatant discarded. Cells were analyzed using FACS Lyric (BD) flow cytometer and percent of cancer cell killing was generated using Cytobank. Percent of cancer cell killing was graphed and IC50 values generated using GraphPad PRISM v.8. Dose response curves were generated by transforming the x axis values using the formula x=lox. Data was then graphed using non-linear regression curve fit analysis “log(inhibitor) vs. response-variable slope (four parameter)”.

TABLE 44
Flow Panel Antibodies for T cell killing Assay

| | | | | | Amount |
|---|---|---|---|---|---|
| Antibody | Conjugated | | Catalog | LOT | added per |
| Name | Fluorophore | Vendor | Number | Number: | well (μl) |
| CD4 | V500 | BD Biosciences | 560768 | 9340575 | 2μ/well |
| CD8 | PerCPCy5.5 | BD Biosciences | 560662 | 9290508 | 2 μl/well |
| CD69 | PE | BD Biosciences | 560968 | 9049603 | 10 μl/well |
| CD25 | BV421 | BD Biosciences | 562443 | 10302 | 2 μl/well |

[1080] CD79b×CD20×CD3 trispecific mediated more potent cytotoxicity as compared to bispecific constructs in CD79b- and CD20-target positive cell lines. IC50 (pM) values are listed in Table 45. No killing has been observed in target negative cell lines (FIG. 12A-12B).

TABLE 45
Killing of target positive (CARNAVAL, OCI-Ly10) cell lines (FACS).

| | | | | CARNAVAL | HBL-1 | OCI-LY10 |
|---|---|---|---|---|---|---|
| Protein ID | CD79b | CD20 | CD3 | IC50 (nM)* | IC50 (nM) | IC50 (nM)** |
| 79C3B646 | CD9B330 | NA | CD3B2030 | 0.29 | 0.73 | >100 nM |
| C923B74 | CD9B330 | C20B22 | CD3B2030 | 0.35 | 2.42 | 24.19 |
| 79C3B601 | CD9B374 | NA | CD3B2030 | NA | 2.86 | >100 nM |
| C923B38 | CD9B374 | C20B22 | CD3B2030 | 0.33 | 2.71 | 48.59 |
| 79C3B651 | CD9B643 | NA | CD3B2030 | 0.25 | 2.20 | >100 nM |
| C923B99 | CD9B643 | C20B22 | CD3B2030 | 0.17 | 1.68 | 16.95 |

*average values of T cell mediated killing from 3 independent T cell donors
**average values of T cell mediated killing from 4 independent T cell donors

[1081] Bispecific CD79b×CD3 Mediated Cytotoxicity Against Autologous B-Cells

[1082] Functional activity of the CD79b×CD3 bispecific constructs was assessed in an in vitro autologous B cell depletion assay. This functional assay utilizes PBMCs to focus on the killing of primary B cells as well as T cell activation on donor matched primary cells. Cryo-preserved PBMCs from 3 different human donors were incubated for 72 hours with CD79b×CD3 test molecules 79C3B646, 79C3B651, and 79C3B601 (300 nM starting concentration at 1:3 serial dilutions) at 37° C. All cells were washed with BD stain buffer (BD Biosciences; Cat #554657), centrifuged at 1200 RPM for 3 minutes, with supernatant discarded. Cells were stained for 10 minutes at room temperature with BD stain buffer containing Fc blocking agent (Accurate Chemical and Scientific Corp; Cat #NB309) and Near IR Fixable Live/Dead stain (Invitrogen; Cat #L10119) at a 1:400 dilution. All cells were washed with BD stain buffer (BD Biosciences; Cat #554657), centrifuged at 1200 RPM for 3 mins, with supernatant discarded. Cells were then stained for 30 minutes at 4° C. with BD stain buffer containing flow panel antibodies (Table 46) at a 1:100 dilution. All cells were washed with BD stain buffer (BD Biosciences; Cat #554657), centrifuged at 1200 RPM for 3 mins, with supernatant discarded. Cells were analyzed using Intellicyt (Sartorius) flow cytometer and mean fluorescent intensity (MFI) was generated using Forcyt software (Sartorius). MFI was graphed and EC50 values generated using GraphPad PRISM v.8. Dose response curves were generated by transforming the x axis values using the formula x=lox. Data was then graphed using non-linear regression curve fit analysis “log(agonist) vs. response-variable slope (four parameter)”.

TABLE 46
Flow Panel Antibodies for Autologous B Cell Depletion Assay

| | Conjugated | | Catalog |
|---|---|---|---|
| Antibody Name | Fluorophore | Vendor | Number |
| Anti-human CD25 | BV650 | BD Biosciences | 563719 |
| Anti-Human CD4 | BV510 | Biolegend | 317444 |
| Anti-Human CD8 | PE-Cy7 | Biolegend | 301012 |
| Anti-Human CD20 | PE | Biolegend | 302306 |
| Anti-Human CD11c | AF647 | BD Biosciences | 565911 |
| Anti-Human CD2 | BV605 | BD Biosciences | 740391 |

[1083] CD79b×CD3 bispecific constructs showed a maximum drug mediated cytotoxicity of 20 percent with low levels of CD4⁺ and CD8⁺ T cell activation as demonstrated by CD25 expression on these T cell subsets, as shown in FIGS. 13A-13C. The CD79b×CD20×CD3 trispecific has a synergistic effect on drug mediated cytotoxicity when compared to control molecules as shown in Table 47.

TABLE 47
CD79b × CD20 × CD3 EC50 Values and Maximum Cytotoxicity

| | | | | Donor 1 | | Donor 2 | | Donor 3 | |
|---|---|---|---|---|---|---|---|---|---|
| | | | | EC50 | | EC50 | | EC50 | |
| Construe Name | CD79b Arm | CD20 Arm | CD3 Arm | (nM) | Cₘₐₓ | (nM) | Cₘₐₓ | (nM) | Cₘₐₓ |
| C923B74 | B330-Fab | C20B22 scFv | CD3B2030 | 78 | 34% | 23 | 66% | UD* | 40% |
| 79C3B646 | | N/A | CD3B2030 | 40 | 9% | 6 | 14% | 8 | 35% |
| C23B98 | N/A | C20B22 scFv | CD3B2030 | UD* | 11% | UD* | 5% | 88 | 52% |
| C923B99 | B643-Fab | C20B22 srFv | CD3B2030 | UD* | 35% | 9 | 67% | 23 | 66% |
| 79C3B651 | | N/A | CD3B2030 | UD* | 5% | UD* | 13% | 17 | 34% |
| C23B98 | N/A | C20B22 | CD3B2030 | UD* | 11% | UD* | 5% | 88 | 52% |
| C923B38 | B374-Fab | C20B22 scFv | CD3B2030 | 1 | 24% | 50 | 30% | UD* | 50% |
| 79C3B601 | | N/A | CD3B2030 | UD* | 10% | UD* | 10% | 20 | 32% |
| C23B98 | N/A | C20B22 scFv | CD3B2030 | UD* | 11% | UD* | 9% | 88 | 52% |

*Undetermined

### Example 6: Biophysical Characterization

[1084] Binding Affinity by SPR

[1085] General Protocol for SPR Affinity Assessment: Affinity assessment of the bispecific and trispecific constructs against human CD79b were measured using recombinantly expressed extracellular domain of CD79b short and long isoforms (CD9W7.001 and CD9W8.001, respectively) by Surface Plasmon Resonance (SPR) using a Biacore 8 k SPR system (Biacore) at 25° C. in HBSP+ buffer. Cross-reactivity of the same antibody panel was also assessed against cyno and mouse antigens (CD9W1.001 and CD9W105.001, respectively). Briefly, a C1 sensor chip was immobilized with anti-human Fc (target immobilization levels of >400 RU) using vendor recommended amino coupling protocol. The test antibodies were captured through immobilized anti-Fc and was followed by the injection of different CD79b constructs at different concentration series (human CD79b short and long isoforms: 30 nM-0.37 nM at 3-fold dilutions; cyno and mouse CD79b: 3000 nM-37 nM at 3-fold dilutions). The association and dissociation phases were measured for 2 or 3 minutes and 30 minutes, respectively. Binding of the trispecifics (C923B168 and C923B169) to CD3 was tested by injecting CD3W220.001 at 100 nM-1.23 nM at 3-fold dilutions, with association and dissociation phases were measured for 3 min and 15 min, respectively (CD79b-00478).

[1086] The raw binding sensorgrams were processed using Biacore Insight software (Biacore) by double-referencing and the processed sensorgrams were analyzed for cross-reactivity and fitted to a 1:1 Langmuir model to obtain on-rates, off-rates and affinities.

[1087] SPR Binding Results: As shown in Table 48 and Table 49, 5he bispecific and trispecific antibodies bound to the human CD79b long isoform (hu CD79b long) with affinities from 0.02-0.06 nM, and to the CD79b short isoform (hu CD79b short) with affinities between 0.27-0.64 nM. The antibody panel showed very poor cross-reactivity to cyno CD79b (KD estimated >3000 nM) or did not bind to mouse CD79b. C923B168 binds recombinant CD3 antigen with an affinity of 0.5 nM. No quantitative kinetics/affinities were reported for those with complex kinetic binding profiles using the specified antigens, as noted in the summary tables below.

TABLE 48
Binding affinities for bispecific antibody constructs

| | KD to hu | KD to hu | |
|---|---|---|---|
| | CD79b | CD79b | KD to hu |
| Name | long (M) | short (M) | CD3 (M) |
| 79C3B601 | 4.6E−11 | 5.6E−10 | n.d** |
| 79C3B646 | 2.2E−11 | 5.8E−10 | n.d** |
| 79C3B651 | 5.2E−11 | 3.5E−10 | n.d** |
| 79C3B605 | n.d* | n.d* | n.d** |
| 79C3B645 | n.d* | n.d* | n.d** |
| 79C3B650 | n.d* | n.d* | n.d** |

*samples not submittedfor SPR binding analysis
**Affinities for CD3 not determined due to complex SPR binding profiles observed for Cris7b derived CD3 antibodies (historically observed results).

TABLE 49
Binding affinities for trispecific antibody constructs

| | KD to hu | KD to hu | KD to hu | KD to |
|---|---|---|---|---|
| | CD79b | CD79b | CD20 | hu CD3 |
| Name | long (M) | short (M) | (M) | (M) |
| C923B38 | 6.5E−11 | 6.4E−10 | n.d** | n.d** |
| C923B74 | 2.3E−11 | 3.9E−10 | n.d** | n.d** |
| C923B99 | 4.0E−11 | 2.7E−10 | n.d** | n.d** |
| C923B36 | n.d* | n.d* | n.d** | n.d** |
| C923B73 | n.d* | n.d* | n.d** | n.d** |
| C923B95 | n.d* | n.d* | n.d** | n.d** |
| C923B168 | 1.92E−10 | n.d* | n.d** | 4.96E−10 |
| C923B169 | 1.64E−10 | n.d* | n.d** | n.d** |

*samples not submittedfor SPR binding analysis
**Affinities for CD20 or CD3 not determined due to SPR constraints with CD20 nanodiscs or complex binding profiles observedfor Cris7b derived CD3 antibodies (historically observed results)

[1088] Binding Epitope by HDX-MS

[1089] The CD79b epitopes bound by trispecific molecules CD9B374 and CD9B643 were mapped by Hydrogen Deuterium Exchange Mass Spectrometry (HDX-MS) according to the following protocol.

[1090] General Procedure for HDX-MS Data Acquisition. HDX-MS sample preparation was performed with automated HDx system (LEAP Technologies, Morrisville, N.C.). The columns and pump were: protease, protease type XIII (protease from Aspergillus saitoi, type XIII)/pepsin column (w/w, 1:1; 2.1×30 mm) (NovaBioAssays Inc., Woburn, Mass.); trap, ACQUITY UPLC BEH C18 VanGuard Pre-column (2.1×5 mm) (Waters, Milford, Mass.), analytical, Accucore C18 (2.1×100 mm) (Thermo Fisher Scientific, Waltham, Mass.); and LC pump, VH-P10-A (Thermo Fisher Scientific). The loading pump (from the protease column to the trap column) was set at 600 μL/min with 0.1% aqueous formic acid. The gradient pump (from the trap column to the analytical column) was set from 9% to 35% acetonitrile in 0.1% aqueous formic acid in 20 min at 100 μL/min.

[1091] MS Data Acquisition. Mass spectrometric analyses were carried out using an LTQ™ Orbitrap Fusion Lumos mass spectrometer (Thermo Fisher Scientific) with the capillary temperature at 275° C., resolution 120,000, and mass range (m/z) 300-1,800.

[1092] HDX-MS Data Extraction. BioPharma Finder 3.0 (Thermo Fisher Scientific) was used for the peptide identification of non-deuterated samples prior to the HDX experiments. HDExaminer version 2.5 (Sierra Analytics, Modesto, Calif.) was used to extract centroid values from the MS raw data files for the HDX experiments.

[1093] HDX-MS Data Analysis. The extracted HDX-MS data were further analyzed in Excel. All exchange time points (at pH 6.4 or pH 7.4 at 3.2° C.) were converted to the equivalent time points at pH 7.4 and 23° C.

[1094] Results

[1095] HDX-MS analysis of CD9B374 and CD9B643 indicate binding to a nearly identical, conformational epitope of CD79 made up of residues 30-42 (SEDRYRNPKGSAC; SEQ ID NO: 253), 50-52 (PRF), 81-86 (EMENP; SEQ ID NO: 254), and 144-148 (GFSTL; SEQ ID NO: 255). The residue numbers are those of CD79B_Human (P40259).

[1096] Thermal Stability of Trispecific CD79b×CD20×CD3 Antibodies by DSC and DSF

[1097] The thermal stability of C923B168 and C923B169 was determined by Differential Scanning calorimetry (DSC) and differential scanning fluorimetry (DSF).

[1098] In this characterization, Tonset and Tagg were determined by DSF and the other thermal stability transitions of Tms were determined by DSC. As shown in Table 50, C923B168 and C923B169 have good thermal stability with Tonset >61° C. and Tm1 >65° C.

TABLE 50
Transition temperatures for trispecific CD79b × CD20 × CD3 antibodies:

| | Tonset | | Tm1 | | Tm2 | | Tm3 | | Tagg | |
|---|---|---|---|---|---|---|---|---|---|---|
| Sample ID | ° C. | σ | ° C. | σ | ° C. | σ | ° C. | σ | ° C. | σ |
| C923B168.008 | 61.3 | 0.15 | 65.5 | 0.03 | 73.5 | 0.18 | 77.3 | 0.07 | 73.8 | 0.37 |
| C923B169.008 | 61.7 | 0.07 | 68.4 | 0.03 | 75.1 | 0.44 | 77.7 | 0.21 | 74.2 | 0.5 |

### Example 7: Functional Characterization of CD79×CD20×CD3 Trispecific Antibodies

[1099] Binding of Trispecific CD79b×CD20×CD3 Antibodies to Pan T-Cells

[1100] Binding of the CD3 arm of CD79b×CD20×CD3 trispecific constructs was assessed using cryo-preserved, negatively selected, primary human CD3⁺ pan T cells. Primary human CD3⁺ pan T cells from three different donors were incubated for 1 hour with CD79b×CD20×CD3 test molecules C923B169 and C923B168 (1 uM starting concentration at 1:3 serial dilutions) at 37° C. All cells were washed with BD stain buffer (BD Biosciences; Cat #554657), centrifuged at 1200 RPM for 3 mins, with supernatant discarded. Cells were then stained for 20 minutes at 4° C. with BD stain buffer containing AlexaFluor 647 labeled anti-human IgG secondary antibody (Jackson Immuno; Cat #109-606-098) at a 1:300 dilution. All cells were washed with BD stain buffer (BD Biosciences; Cat #554657), centrifuged at 1200 RPM for 3 mins, with supernatant discarded. Cells were resuspended in 50ul of FACS buffer containing a 1:1000 dilution of Cytox Green viability dye (Invitrogen, Cat #S34860). Cells were analyzed using Intellicyt (Sartorius) flow cytometer and mean fluorescent intensity (MFI) was generated using Forcyt software (Sartorius). MFI was graphed using GraphPad PRISM v.8. Dose response curves were generated by transforming the x axis values using the formula x=lox. Data was then graphed using non-linear regression curve fit analysis “log(agonist) vs. response-variable slope (four parameter)”.

[1101] All CD79b×CD20×CD3 molecules showed binding on all donor Pan T cells expressing endogenous CD3 on the cell surface, shown in Table 51.

TABLE 51
C923B169 and C923B168 CD79b × CD20 ×
CD3 binding to Pan CD3 T cells.

| | Pan T cell binding, | | | Pan T cell max binding, | | |
|---|---|---|---|---|---|---|
| Construct | EC50 (nM) | | | MFI (×10⁶) | | |
| Name | Donor 1 | Donor 2 | Donor 3 | Donor 1 | Donor 2 | Donor 3 |
| C923B168 | 125 | 91 | 97 | 1.3 | 1.0 | 1.0 |
| C923B169 | UD* | UD* | UD* | 0.1 | 0.03 | 0.04 |

UD* = undetermined

[1102] FACS T Cell Killing Data on Panel of Target Positive (CD79b⁺ and CD20⁺) Cell Lines

[1103] Functional activity of the CD79b×CD20×CD3 trispecific constructs was assessed at 48 and 72 hr time point in an in vitro T cell killing assay by flow cytometry using cell lines that were validated by flow cytometry to have different endogenous expression levels of CD79b and CD20 on the cell surface, shown in Table 52.

TABLE 52
CD79b and CD20 Antigen Density of B Lymphoma Cell Lines

| | | | CD20 Antigen |
|---|---|---|---|
| | | CD79b Antigen | Density |
| | | Density (Antigen | (Antigen |
| Cell Line | Cell Type | Number/cell) | Number/cell) |
| OCI-LY10 | Diffuse large B-cell | 38,885 | 67,352 |
| | lymphoma line | | |
| CARNAVAL | Diffuse large B-cell | 98,176 | 118,789 |
| | lymphoma line | | |
| JEKO-1 | Mantle cell lymphoma | 280,000 | 50,000 |

[1104] Target cancer cells were maintained in complete RPMI-1640 (ThermoFisher, catalog #11875093) media containing 10% heat inactivated fetal bovine serum. Prior to the assay, antibodies were made at 3-fold serial dilutions in RPMI 1640 media containing 10% heat inactivated fetal bovine serum, at 4-fold expected final concentration. A volume of 50 μL of medium-diluted bispecific or trispecific Ab in each well of a 96-well plate were further diluted into 200 μL by adding a mix of target and effector cell suspension. The target cell lines were harvested by centrifuge at 400×g for 5 min, washed one time with RPMI 1640 media. Target cancer cells were stain targets with CellTrace CFSE (ThermoFisher; Cat #: C34554) diluted 1/5000. Healthy donor T cells (isolated by CD3—negative selection provided by Discovery Life Sciences) were thawed in complete media (RPMI 1640 media containing 10% heat inactivated fetal bovine serum), counted and suspended in fresh complete phenol red-free RPMI 1640 media at 1×10⁶ cells/mL. Target cells and T cells were mixed to obtain 5:1 effector to target cell ratio. Cell suspension was added to antibody dilution wells according to plate layout (150 μL/well). Cells were incubated for 48 and 72 hours with CD79b×CD20x×CD3 test molecules C923B169 and C923B168 (100 nM starting concentration at 1:3 serial dilutions) at 37° C. All cells were washed with BD stain buffer (BD Biosciences; Cat #554657), centrifuged at 1200 RPM for 3 minutes, with supernatant discarded. Cells were stained for 15 minutes at room temperature with Fixable Live/Dead stain (ThermoFisher; Cat #65-0865-14) at a 1:1000 dilution. All cells were washed with BD stain buffer (BD Biosciences; Cat #554657), centrifuged at 1200 RPM for 3 mins, with supernatant discarded. Cells were then stained for 30 minutes at 4° C. with BD stain buffer containing flow panel antibodies (Table 53), antibodies amount added as listed in the table. All cells were washed with BD stain buffer (BD Biosciences; Cat #554657), centrifuged at 1200 RPM for 3 mins, with supernatant discarded. Cells were analyzed using FACS Lyric (BD) flow cytometer and percent of cancer cell killing was generated using Cytobank. Percent of cancer cell killing was graphed and IC50 values generated using GraphPad PRISM v.8. Dose response curves were generated by transforming the x axis values using the formula x=lox. Data was then graphed using non-linear regression curve fit analysis “log(inhibitor) vs. response-variable slope (four parameter)”.

TABLE 53
Flow Panel Antibodies for T cell killing Assay

| | | | | | Amount |
|---|---|---|---|---|---|
| Antibody | Conjugated | | Catalog | LOT | added per |
| Name | Fluorophore | Vendor | Number | Number: | well (μl) |
| CD4 | V500 | BD | 560768 | 9340575 | 2/well |
| | | Biosciences | | | |
| CD8 | PerCPCy5.5 | BD | 560662 | 9290508 | 2 ul/well |
| | | Biosciences | | | |
| CD69 | PE | BD | 560968 | 9049603 | 10 ul/well |
| | | Biosciences | | | |
| CD25 | BV421 | BD | 562443 | 10302 | 2 ul/well |
| | | Biosciences | | | |

[1105] CD79b×CD20×CD3 trispecific mediated potent cytotoxicity. IC50 (nM) values and Max killing values are listed in Table 54 and Table 55.

TABLE 54
C923B169 and C923B168 CD79b × CD20 × CD3 killing of target positive (CARNAVAL,
OCI-Ly10, JEK0-1) cell lines (FACS) at 48 hours. IC50 (nM) and percent of maximal
killing are listed in the table. Average values from 2 independent T cell donors.

| | Killing | | Killing | | Killing | | Killing | | Killing | | Killing | |
|---|---|---|---|---|---|---|---|---|---|---|---|---|
| | CARNAVAL | | CARNAVAL | | JEKO-1 | | JEKO-1 | | OCI-Ly10 | | OCI-Ly10 | |
| | 1:1 48 hr | | 5:1 48 hr | | 1:1 48 hr | | 5:1 48 hr | | 1:1 48 hr | | 5:14 8 hr | |
| Protein ID | IC50 | Max | IC50 | Max | IC50 | Max | IC50 | Max | IC50 | Max | IC50 | Max |
| C923B169 | 110.3 | 49.7% | 0.179 | 87.2% | 27.307 | 60.8% | 0.027 | 93.5% | >100 | 22.2% | >100 | 19.7% |
| C923B168 | 13.6 | 58.8% | 0.012 | 95.0% | 7.466 | 65.3% | 0.002 | 96.7% | >100 | 25.1% | >100 | 29.8% |

TABLE 55
C923B169 and C923B168 CD79b × CD20 × CD3 killing of target positive CARNAVAL,
OCI-Ly10, JEK0-1) cell lines (FACS) at 72 hours. IC50 (nM) and percent of maximal
killing are listed in the table. Average values from 2 independent T cell donors.

| | Killing | | Killing | | Killing | | Killing | | Killing | | Killing | |
|---|---|---|---|---|---|---|---|---|---|---|---|---|
| | CARNAVAL; | | CARNAVAL; | | JEKO-1; | | JEKO-1; | | OCI-Ly10; | | OCI-Ly10; | |
| | 1:1 72 hr | | 5:1 72 hr | | 1:1 72 hr | | 5:1 72 hr | | 1:1 72 hr | | 5:1 72 hr | |
| Protein ID | IC50 | Max | IC50 | Max | IC50 | Max | IC50 | Max | IC50 | Max | IC50 | Max |
| C923B169 | 50.15 | 66.8% | 0.026 | 98.3% | 0.087 | 82.2 | 0.003 | 99.4% | >100 | 43.5% | 24.58 | 70.0% |
| C923B168 | 15.53 | 75.9% | 0.003 | 99.3% | 0.010 | 85.8% | 0.001 | 99.6% | 0.81 | 61.0% | 0.51 | 90.7% |

[1106] C923B169 and C923B168 CD79b×CD20×CD3 Mediated Cytotoxicity Against Autologous B-Cells

[1107] Functional activity of the C923B169 and C923B168 CD79b×CD20×CD3 constructs was assessed in an in vitro autologous B cell depletion assay. This functional assay utilizes PBMCs to focus on the killing of primary B cells as well as T cell activation on donor matched primary cells. Cryo-preserved PBMCs from 3 different human donors were incubated for 72 hours with CD79b×CD20×CD3 test molecules C923B169 and C923B168 (300 nM starting concentration at 1:3 serial dilutions) at 37° C. All cells were washed with BD stain buffer (BD Biosciences; Cat #554657), centrifuged at 1200 RPM for 3 minutes, with supernatant discarded. Cells were stained for 10 minutes at room temperature with BD stain buffer containing Fc blocking agent (Accurate Chemical and Scientific Corp; Cat #NB309) and Near IR Fixable Live/Dead stain (Invitrogen; Cat #L10119) at a 1:400 dilution. All cells were washed with BD stain buffer (BD Biosciences; Cat #554657), centrifuged at 1200 RPM for 3 mins, with supernatant discarded. Cells were then stained for 30 minutes at 4° C. with BD stain buffer containing flow panel antibodies (Table 56) at a 1:100 dilution. All cells were washed with BD stain buffer (BD Biosciences; Cat #554657), centrifuged at 1200 RPM for 3 mins, with supernatant discarded. Cells were analyzed using Intellicyt (Sartorius) flow cytometer. EC50 values generated using GraphPad PRISM v.8. Dose response curves were generated by transforming the x axis values using the formula x=lox. Data was then graphed using non-linear regression curve fit analysis “log(agonist) vs. response-variable slope (four parameter)”.

TABLE 56
Flow Panel Antibodies for Autologous B Cell Depletion Assay

| | Conjugated | | Catalog |
|---|---|---|---|
| Antibody Name | Fluorophore | Vendor | Number |
| Anti-human CD25 | BV650 | BD Biosciences | 563719 |
| Anti-Human CD4 | BV510 | Biolegend | 317444 |
| Anti-Human CD8 | PE-Cy7 | Biolegend | 301012 |
| Anti-Human CD20 | PE | Biolegend | 302306 |
| Anti-Human CD11c | AF647 | BD Biosciences | 565911 |
| Anti-Human CD2 | BV605 | BD Biosciences | 740391 |

[1108] CD79b×CD20×CD3 C923B169 and C923B168 constructs showed a maximum drug mediated cytotoxicity of 69-95 percent (Table 57) with low levels of CD4⁺ and CD8⁺ T cell activation as demonstrated by CD25 expression on these T cell subsets.

TABLE 57
C923B169 and C923B168 CD79b × CD20 × CD3 killing of B cell in the primary
autologous B cell depletion assay at 72 hours. EC50 (nM) and percent of maximal
killing are listed in the table. Values from 3 independent T cell donors listed.

| | D329465 | | D198013 | | D221837 | | Average values | |
|---|---|---|---|---|---|---|---|---|
| | EC50 | Max Kill | EC50 | Max Kill | EC50 | Max Kill | EC50 | Max Kill |
| Name | (nM) | (%) | (nM) | (%) | (nM) | (%) | (nM) | (%) |
| C923B168 | 0.1 | 69 | 0.02 | 92 | 0.1 | 95 | 0.07 | 84 |
| C923B169 | 2.0 | 69 | 1.70 | 92 | 6.30 | 81 | 2.80 | 80 |

### Example 8: Generation of Bispecific PSMAxCD3 Antibodies

### Example 8.1: FAB-ARM Exchange of Anti-PSMA and Anti-CD3 Antibodies

[1109] The formation of bispecific antibodies requires two parental monoclonal antibodies (mAbs), one specific for the targeting arm (e.g. PMSA) and one specific for the effector arm (e.g. CD3). Selected monospecific anti-PSMA and anti-CD3 antibodies were expressed as IgG1/κ engineered to have L234A, L235A and D265S substitutions for cF silencing, (EU numbering). Selected monospecific anti-PSMA and anti-CD3 antibodies are also expressed as IgG4 antibodies. Mutations designed to promote selective heterodimerization of the Fc domain were also engineered in the Fc domain.

[1110] The monospecific antibodies were expressed in CHO cell lines under CMV promoters as described above). The parental PSMA and CD3 antibodies were purified using a protein A column with an elution buffer of 100 mM NaAc pH3.5 and a neutralization puffer of 2 M Tris pH 7.5 and 150 mM NaCl. The anti-PSMA and anti-CD3 monoclonal antibodies were dialyzed into D-PBS, pH 7.2 buffer.

[1111] For DuoBody antibodies, post purification of parental monospecific antibodies, bispecific PSMAxCD3 antibodies were generated by mixing the parental PSMA antibodies with the desired parental CD3 antibody under reducing conditions in 75 mM cysteamine-HCl and incubated overnight at room temperature for in vitro Fab arm exchange as described in Int. Patent Publ. No. WO2011/131746. The recombination reactions were based on molar ratios, where a set amount of PSMA antibody (e.g., 10 mg, or ˜74.6 nanomoles) was combined with CD3 antibody (e.g., ˜70.87 nanomoles), where the PSMA antibody was added in a 5% excess of the CD3 antibody. The concentrations of the PSMA antibody stocks varied from 0.8 to 6 mg/mL, and the volumes the recombination reactions varied for each pairing. The recombinations were subsequently dialyzed overnight against PBS to remove the reductant. The PSMAxCD3 bispecific antibody reactions were performed with an excess of the PSMA antibody (ratio) to minimize the amount of unreacted CD3 parental antibody remaining after recombination.

[1112] Other bispecifics were generated via co-transfection of HC1:HC2:LC2, typically at a DNA ratio of 1:1:3. Purification was performed by protein A chromatography and CH1 affinity capture, followed by an ion exchange-based chromatography.

[1113] Exemplary PSMAxCD3 multispecific antibodies are provided in Tables 58 through 63.

TABLE 58
PSMA × CD3 Bispecific Antibodies: Clone Descriptions

| Name | Bispecific Description |
|---|---|
| PS3B1353 | HC1 (F405L): CD3B376 × HC2 (K409R): PSMB896 |
| PS3B1505 | HC1 CD3B376-Fab × HC2 PSMB896-G100A IgG1 |
| | DuoBody |
| PS3B1508 | HC1 (Knob3): CD3W245-LH-scFv; HC2 (Hole3-RF) |
| | PSMB896-G100A-Fab-RF: IgG1 AAS |
| PS3B1917 | HC1 (ZWA w/o K447_RF): CD3B376-Fab, HC2 (ZWB w/o |
| | K447): PSMA_P72_A10-HC-G54E-scFv LH |
| PS3B1918 | HC1 (ZWA w/o K447_RF): CD3B376-Fab, HC2 (ZWB w/o |
| | K447): PSMA_P72_D01-HC-D95E-scFv LH |
| PS3B1919 | HC1 (ZWA w/o K447_RF): CD3B376-Fab; HC2 (ZWB w/o |
| | K447): PSMA_P75_F01, LH |
| PS3B1920 | HC1 (ZWA w/o K447_RF): CD3B376-Fab; HC2 (ZWB w/o |
| | K447): PSMA_P72_F07, LH |
| PS3B1921 | HC1 (ZWA w/o K447_RF): CD3B376-Fab; HC2 (ZWB w/o |
| | K447): PSMA_P72_E07, LH |
| PS3B1922 | HC1 (ZWA w/o K447_RF): CD3B376-Fab; HC2 (ZWB w/o |
| | K447): PSMA_P72_D01, LH |
| PS3B1923 | HC1 (ZWA w/o K447_RF): CD3B376-Fab; HC2 (ZWB w/o |
| | K447): PSMA_P72_C01, LH |
| PS3B1924 | HC1 (ZWA w/o K447_RF): CD3B376-Fab; HC2 (ZWB w/o |
| | K447): PSMA_P72_A10, LH |
| PS3B1925 | HC1 (ZWA w/o K447_RF): CD3B376-Fab; HC2 (ZWB w/o |
| | K447): PSMA_P70_F02, LH |
| PS3B1926 | HC1 (ZWA w/o K447_RF): CD3B376-Fab; HC2 (ZWB w/o |
| | K447): PSMA_P72_G02, HL |
| PS3B1927 | HC1 (ZWA w/o K447_RF): CD3B376-Fab; HC2 (ZWB w/o |
| | K447): PSMA_P72_C01, HL |
| PS3B1928 | HC1 (ZWA w/o K447_RF): CD3B376-Fab; HC2 (ZWB w/o |
| | K447): PSMA_P72_A11, HL |
| PSMB1041 | HC1 (ZWA): B23B62-Fab; HC2 (ZWB): PSMA_P70_F02, |
| | LH |
| PSMB1045 | HC1 (ZWA): B23B62-Fab; HC2 (ZWB): PSMA_P72_A10, |
| | LH |
| PSMB1047 | HC1 (ZWA): B23B62-Fab; HC2 (ZWB): PSMA_P72_C01, |
| | LH |
| PSMB1049 | HC1 (ZWA): B23B62-Fab; HC2 (ZWB): PSMA_P72_D01, |
| | LH |
| PSMB1051 | HC1 (ZWA): B23B62-Fab; HC2 (ZWB): PSMA_P72_E07, |
| | LH |
| PSMB1052 | HC1 (ZWA): B23B62-Fab; HC2 (ZWB): PSMA_P72_F07, |
| | LH |
| PSMB1060 | HC1 (ZWA): B23B62-Fab; HC2 (ZWB): PSMA_P75_F01, |
| | LH |
| PSMB1068 | HC1 (ZWA): B23B62-Fab; HC2 (ZWB): PSMA_P72_A11, |
| | HL |
| PSMB1069 | HC1 (ZWA): B23B62-Fab; HC2 (ZWB): PSMA_P72_C01, |
| | HL |
| PSMB1075 | HC1 (ZWA): B23B62-Fab; HC2 (ZWB): PSMA_P72_G02, |
| | HL |
| PSMB2908 | HC1 (ZWA w/o K447): B23B62-Fab, HC2 (ZWB w/o |
| | K447): PSMA_P72_D01-HC-D95E-scFv LH |
| PSMB2909 | HC1 (ZWA w/o K447): B23B62-Fab, HC2 (ZWB w/o |
| | K447)): PSMA_P72_A10-HC-G54E-scFv LH |
| PS3B1391 | HC 1: N-term scFv LH CD3B2030 N106A LH-scFv (MA), |
| | HC 2: N-term_Fab_PSMHB49SC1133_011A11_1 |
| PS3B1396 | HC1 (Knob3): CD3B2030-N106A-scFv LH, HC2 (Hole3): |
| | PSMB896-G100A-Fab |

TABLE 59
PSMA x CD3 Bispecific Antibodies: CD3 Arm Descriptions

| | | SEQ | | SEQ | CD3 Arm |
|---|---|---|---|---|---|
| Name | HC1 | ID NO. | LC1 | ID NO. | Description |
| PS3B1353 | QVQLQQSGPRLVRPSQTLSLTC | 1188 | QSALTQPASVSG | 1189 | with |
| | AISGDSVFNNNAAWSWIRQSPS | | SPGQSITISCTGT | | CD3B376 |
| | RGLEWLGRTYYRSKWLYDYAVS | | SSNIGTYKFVSW | | arm |
| | VKSRITVNPDTSRNQFTLQL | | YQQHPDKAPKV | | (CD3B891 |
| | NSVTPEDTALYYCARGYSSSFD | | LLYEVSKRPSGV | | without K477 |
| | YWGQGTLVTVSSASTKGPSVFP | | SSRFSGSKSGNT | | or |
| | LAPSSKSTSGGTAALGCLVKDY | | ASLTISGLQAED | | CD3B2197 |
| | FPEPVTVSWNSGALTSGVHTFP | | QADYHCVSYAG | | with K477 in |
| | AVLQSSGLYSLSSVVTVPSSSLG | | SGTLLFGGGTKL | | HC1) |
| | TQTYICNVNHKPSNTKVDKKV | | TVLGQPKAAPSV | | |
| | EPKSCDKTHTCPPCPAPEAAGG | | TLFPPSSEELQAN | | |
| | PSVFLFPPKPKDTLMISRTPEVT | | KATLVCLISDFY | | |
| | CVVVSVSHEDPEVKFNWYVDG | | PGAVTVAWKAD | | |
| | VEVHNAKTKPREEQYNSTYRV | | SSPVKAGVETTT | | |
| | VSVLTVLHQDWLNGKEYKCK | | PSKQSNNKYAAS | | |
| | VSNKALPAPIEKTISKAKGQPRE | | SYLSLTPEQWKS | | |
| | PQVYTLPPSREEMTKNQVSLTC | | HRSYSCQVTHEG | | |
| | LVKGFYPSDIAVEWESNGQPEN | | STVEKTVAPTEC | | |
| | NYKTTPPVLDSDGSFLLYSKLT | | S | | |
| | VDKSRWQQGNVFSCSVMHEAL | | | | |
| | HNHYTQKSLSLSPGK | | | | |
| PS3B1505 | QVQLQQSGPRLVRPSQTLSLTC | 1190 | QSALTQPASVSG | 1191 | with |
| | AISGDSVFNNNAAWSWIRQSPS | | SPGQSITISCTGT | | CD3B376 |
| | RGLEWLGRTYYRSKWLYDYA | | SSNIGTYKFVSW | | arm |
| | VSVKSRITVNPDTSRNQFTLQL | | YQQHPDKAPKV | | (CD3B891 |
| | NSVTPEDTALYYCARGYSSSFD | | LLYEVSKRPSGV | | without K477 |
| | YWGQGTLVTVSSASTKGPSVFP | | SSRFSGSKSGNT | | or |
| | LAPSSKSTSGGTAALGCLVKDY | | ASLTISGLQAED | | CD3B2197 |
| | FPEPVTVSWNSGALTSGVHTFP | | QADYHCVSYAG | | with K477 in |
| | AVLQSSGLYSLSSVVTVPSSSLG | | SGTLLFGGGTKL | | HC1) |
| | TQTYICNVNHKPSNTKVDKKV | | TVLGQPKAAPSV | | |
| | EPKSCDKTHTCPPCPAPEAAGG | | TLFPPSSEELQAN | | |
| | PSVFLFPPKPKDTLMISRTPEVT | | KATLVCLISDFY | | |
| | CVVVSVSHEDPEVKFNWYVDG | | PGAVTVAWKAD | | |
| | VEVHNAKTKPREEQYNSTYRV | | SSPVKAGVETTT | | |
| | VSVLTVLHQDWLNGKEYKCK | | PSKQSNNKYAAS | | |
| | VSNKALPAPIEKTISKAKGQPRE | | SYLSLTPEQWKS | | |
| | PQVYTLPPSREEMTKNQVSLTC | | HRSYSCQVTHEG | | |
| | LVKGFYPSDIAVEWESNGQPEN | | STVEKTVAPTEC | | |
| | NYKTTPPVLDSDGSFLLYSKLT | | S | | |
| | VDKSRWQQGNVFSCSVMHEAL | | | | |
| | HNHYTQKSLSLSPGK | | | | |
| PS3B1508 | DIQMTQSPSSLSASVGDRVTITC | 1192 | NA | 1193 | with |
| | RARQSIGTAIHWYQQKPGKAP | | | | CD3W245 |
| | KLLIKYASESISGVPSRFSGSGS | | | | arm |
| | GTDFTLTISSLQPEDFATYYCQQ | | | | (CD3B2183 |
| | SGSWPYTFGQGTKLEIKGGSEG | | | | without |
| | KSSGSGSESKSTGGSEVQLVES | | | | K477) |
| | GGGLVKPGGSLRLSCAASGFTF | | | | |
| | SRYNMNWVRQAPGKGLEWVS | | | | |
| | SISTSSNYIYYADSVKGRFTFSR | | | | |
| | DNAKNSLDLQMSGLRAEDTAI | | | | |
| | YYCTRGWGPFDYWGQGTLVT | | | | |
| | VSSEPKSSDKTHTCPPCPAPEAA | | | | |
| | GGPSVFLFPPKPKDTLMISRTPE | | | | |
| | VTCVVVSVSHEDPEVKFNWYV | | | | |
| | DGVEVHNAKTKPREEQYNSTY | | | | |
| | RVVSVLTVLHQDWLNGKEYKC | | | | |
| | KVSNKALPAPIEKTISKAKGQP | | | | |
| | REPQVYTLPPSREEMTKNQVSL | | | | |
| | WCLVKGFYPSDIAVEWESNGQ | | | | |
| | PENNYKTTPPVLDSDGSFFLYS | | | | |
| | KLTVDKSRWQQGNVFSCSVMH | | | | |
| | EALHNHYTQKSLSLSPGK | | | | |
| PS3B1917 | QVQLQQSGPRLVRPSQTLSLTC | 1194 | QSALTQPASVSG | 1195 | with |
| | AISGDSVFNNNAAWSWIRQSPS | | SPGQSITISCTGT | | CD3B376 |
| | RGLEWLGRTYYRSKWLYDYA | | SSNIGTYKFVSW | | arm |
| | VSVKSRITVNPDTSRNQFTLQL | | YQQHPDKAPKV | | (CD3B891 |
| | NSVTPEDTALYYCARGYSSSFD | | LLYEVSKRPSGV | | without K477 |
| | YWGQGTLVTVSSASTKGPSVFP | | SSRFSGSKSGNT | | or |
| | LAPSSKSTSGGTAALGCLVKDY | | ASLTISGLQAED | | CD3B2197 |
| | FPEPVTVSWNSGALTSGVHTFP | | QADYHCVSYAG | | with K477 in |
| | AVLQSSGLYSLSSVVTVPSSSLG | | SGTLLFGGGTKL | | HC1) |
| | TQTYICNVNHKPSNTKVDKKV | | TVLRTVAAPSVF | | |
| | EPKSCDKTHTCPPCPAPEAAGG | | IFPPSDEQLKSGT | | |
| | PSVFLFPPKPKDTLMISRTPEVT | | ASVVCLLNNFYP | | |
| | CVVVSVSHEDPEVKFNWYVDG | | REAKVQWKVDN | | |
| | VEVHNAKTKPREEQYNSTYRV | | ALQSGNSQESVT | | |
| | VSVLTVLHQDWLNGKEYKCK | | EQDSKDSTYSLS | | |
| | VSNKALPAPIEKTISKAKGQPRE | | STLTLSKADYEK | | |
| | PQVYVYPPSREEMTKNQVSLTC | | HKVYACEVTHQ | | |
| | LVKGFYPSDIAVEWESNGQPEN | | GLSSPVTKSFNR | | |
| | NYKTTPPVLDSDGSFALVSKLT | | GEC | | |
| | VDKSRWQQGNVFSCSVMHEAL | | | | |
| | HNRFTQKSLSLSPG | | | | |
| PS3B1918 | QVQLQQSGPRLVRPSQTLSLTC | 1196 | QSALTQPASVSG | 1197 | with |
| | AISGDSVFNNNAAWSWIRQSPS | | SPGQSITISCTGT | | CD3B376 |
| | RGLEWLGRTYYRSKWLYDYA | | SSNIGTYKFVSW | | arm |
| | VSVKSRITVNPDTSRNQFTLQL | | YQQHPDKAPKV | | (CD3B891 |
| | NSVTPEDTALYYCARGYSSSFD | | LLYEVSKRPSGV | | without K477 |
| | YWGQGTLVTVSSASTKGPSVFP | | SSRFSGSKSGNT | | or |
| | LAPSSKSTSGGTAALGCLVKDY | | ASLTISGLQAED | | CD3B2197 |
| | FPEPVTVSWNSGALTSGVHTFP | | QADYHCVSYAG | | with K477 in |
| | AVLQSSGLYSLSSVVTVPSSSLG | | SGTLLFGGGTKL | | HC1) |
| | TQTYICNVNHKPSNTKVDKKV | | TVLRTVAAPSVF | | |
| | EPKSCDKTHTCPPCPAPEAAGG | | IFPPSDEQLKSGT | | |
| | PSVFLFPPKPKDTLMISRTPEVT | | ASVVCLLNNFYP | | |
| | CVVVSVSHEDPEVKFNWYVDG | | REAKVQWKVDN | | |
| | VEVHNAKTKPREEQYNSTYRV | | ALQSGNSQESVT | | |
| | VSVLTVLHQDWLNGKEYKCK | | EQDSKDSTYSLS | | |
| | VSNKALPAPIEKTISKAKGQPRE | | STLTLSKADYEK | | |
| | PQVYVYPPSREEMTKNQVSLTC | | HKVYACEVTHQ | | |
| | LVKGFYPSDIAVEWESNGQPEN | | GLSSPVTKSFNR | | |
| | NYKTTPPVLDSDGSFALVSKLT | | GEC | | |
| | VDKSRWQQGNVFSCSVMHEAL | | | | |
| | HNRFTQKSLSLSPG | | | | |
| PS3B1919 | QVQLQQSGPRLVRPSQTLSLTC | 1198 | QSALTQPASVSG | 1199 | with |
| | AISGDSVFNNNAAWSWIRQSPS | | SPGQSITISCTGT | | CD3B376 |
| | RGLEWLGRTYYRSKWLYDYA | | SSNIGTYKFVSW | | arm |
| | VSVKSRITVNPDTSRNQFTLQL | | YQQHPDKAPKV | | (CD3B891 |
| | NSVTPEDTALYYCARGYSSSFD | | LLYEVSKRPSGV | | without K477 |
| | YWGQGTLVTVSSASTKGPSVFP | | SSRFSGSKSGNT | | or |
| | LAPSSKSTSGGTAALGCLVKDY | | ASLTISGLQAED | | CD3B2197 |
| | FPEPVTVSWNSGALTSGVHTFP | | QADYHCVSYAG | | with K477 in |
| | AVLQSSGLYSLSSVVTVPSSSLG | | SGTLLFGGGTKL | | HC1) |
| | TQTYICNVNHKPSNTKVDKKV | | TVLRTVAAPSVF | | |
| | EPKSCDKTHTCPPCPAPEAAGG | | IFPPSDEQLKSGT | | |
| | PSVFLFPPKPKDTLMISRTPEVT | | ASVVCLLNNFYP | | |
| | CVVVSVSHEDPEVKFNWYVDG | | REAKVQWKVDN | | |
| | VEVHNAKTKPREEQYNSTYRV | | ALQSGNSQESVT | | |
| | VSVLTVLHQDWLNGKEYKCK | | EQDSKDSTYSLS | | |
| | VSNKALPAPIEKTISKAKGQPRE | | STLTLSKADYEK | | |
| | PQVYVYPPSREEMTKNQVSLTC | | HKVYACEVTHQ | | |
| | LVKGFYPSDIAVEWESNGQPEN | | GLSSPVTKSFNR | | |
| | NYKTTPPVLDSDGSFALVSKLT | | GEC | | |
| | VDKSRWQQGNVFSCSVMHEAL | | | | |
| | HNRFTQKSLSLSPG | | | | |
| PS3B1920 | QVQLQQSGPRLVRPSQTLSLTC | 1200 | QSALTQPASVSG | 1201 | with |
| | AISGDSVFNNNAAWSWIRQSPS | | SPGQSITISCTGT | | CD3B376 |
| | RGLEWLGRTYYRSKWLYDYA | | SSNIGTYKFVSW | | arm |
| | VSVKSRITVNPDTSRNQFTLQL | | YQQHPDKAPKV | | (CD3B891 |
| | NSVTPEDTALYYCARGYSSSFD | | LLYEVSKRPSGV | | without K477 |
| | YWGQGTLVTVSSASTKGPSVFP | | SSRFSGSKSGNT | | or |
| | LAPSSKSTSGGTAALGCLVKDY | | ASLTISGLQAED | | CD3B2197 |
| | FPEPVTVSWNSGALTSGVHTFP | | QADYHCVSYAG | | with K477 in |
| | AVLQSSGLYSLSSVVTVPSSSLG | | SGTLLFGGGTKL | | HC1) |
| | TQTYICNVNHKPSNTKVDKKV | | TVLRTVAAPSVF | | |
| | EPKSCDKTHTCPPCPAPEAAGG | | IFPPSDEQLKSGT | | |
| | PSVFLFPPKPKDTLMISRTPEVT | | ASVVCLLNNFYP | | |
| | CVVVSVSHEDPEVKFNWYVDG | | REAKVQWKVDN | | |
| | VEVHNAKTKPREEQYNSTYRV | | ALQSGNSQESVT | | |
| | VSVLTVLHQDWLNGKEYKCK | | EQDSKDSTYSLS | | |
| | VSNKALPAPIEKTISKAKGQPRE | | STLTLSKADYEK | | |
| | PQVYVYPPSREEMTKNQVSLTC | | HKVYACEVTHQ | | |
| | LVKGFYPSDIAVEWESNGQPEN | | GLSSPVTKSFNR | | |
| | NYKTTPPVLDSDGSFALVSKLT | | GEC | | |
| | VDKSRWQQGNVFSCSVMHEAL | | | | |
| | HNRFTQKSLSLSPG | | | | |
| PS3B1921 | QVQLQQSGPRLVRPSQTLSLTC | 1202 | QSALTQPASVSG | 1203 | with |
| | AISGDSVFNNNAAWSWIRQSPS | | SPGQSITISCTGT | | CD3B376 |
| | RGLEWLGRTYYRSKWLYDYA | | SSNIGTYKFVSW | | arm |
| | VSVKSRITVNPDTSRNQFTLQL | | YQQHPDKAPKV | | (CD3B891 |
| | NSVTPEDTALYYCARGYSSSFD | | LLYEVSKRPSGV | | without K477 |
| | YWGQGTLVTVSSASTKGPSVFP | | SSRFSGSKSGNT | | or |
| | LAPSSKSTSGGTAALGCLVKDY | | ASLTISGLQAED | | CD3B2197 |
| | FPEPVTVSWNSGALTSGVHTFP | | QADYHCVSYAG | | with K477 in |
| | AVLQSSGLYSLSSVVTVPSSSLG | | SGTLLFGGGTKL | | HC1) |
| | TQTYICNVNHKPSNTKVDKKV | | TVLRTVAAPSVF | | |
| | EPKSCDKTHTCPPCPAPEAAGG | | IFPPSDEQLKSGT | | |
| | PSVFLFPPKPKDTLMISRTPEVT | | ASVVCLLNNFYP | | |
| | CVVVSVSHEDPEVKFNWYVDG | | REAKVQWKVDN | | |
| | VEVHNAKTKPREEQYNSTYRV | | ALQSGNSQESVT | | |
| | VSVLTVLHQDWLNGKEYKCK | | EQDSKDSTYSLS | | |
| | VSNKALPAPIEKTISKAKGQPRE | | STLTLSKADYEK | | |
| | PQVYVYPPSREEMTKNQVSLTC | | HKVYACEVTHQ | | |
| | LVKGFYPSDIAVEWESNGQPEN | | GLSSPVTKSFNR | | |
| | NYKTTPPVLDSDGSFALVSKLT | | GEC | | |
| | VDKSRWQQGNVFSCSVMHEAL | | | | |
| | HNRFTQKSLSLSPG | | | | |
| PS3B1922 | QVQLQQSGPRLVRPSQTLSLTC | 1204 | QSALTQPASVSG | 1205 | with |
| | AISGDSVFNNNAAWSWIRQSPS | | SPGQSITISCTGT | | CD3B376 |
| | RGLEWLGRTYYRSKWLYDYA | | SSNIGTYKFVSW | | arm |
| | VSVKSRITVNPDTSRNQFTLQL | | YQQHPDKAPKV | | (CD3B891 |
| | NSVTPEDTALYYCARGYSSSFD | | LLYEVSKRPSGV | | without K477 |
| | YWGQGTLVTVSSASTKGPSVFP | | SSRFSGSKSGNT | | or |
| | LAPSSKSTSGGTAALGCLVKDY | | ASLTISGLQAED | | CD3B2197 |
| | FPEPVTVSWNSGALTSGVHTFP | | QADYHCVSYAG | | with K477 in |
| | AVLQSSGLYSLSSVVTVPSSSLG | | SGTLLFGGGTKL | | HC1) |
| | TQTYICNVNHKPSNTKVDKKV | | TVLRTVAAPSVF | | |
| | EPKSCDKTHTCPPCPAPEAAGG | | IFPPSDEQLKSGT | | |
| | PSVFLFPPKPKDTLMISRTPEVT | | ASVVCLLNNFYP | | |
| | CVVVSVSHEDPEVKFNWYVDG | | REAKVQWKVDN | | |
| | VEVHNAKTKPREEQYNSTYRV | | ALQSGNSQESVT | | |
| | VSVLTVLHQDWLNGKEYKCK | | EQDSKDSTYSLS | | |
| | VSNKALPAPIEKTISKAKGQPRE | | STLTLSKADYEK | | |
| | PQVYVYPPSREEMTKNQVSLTC | | HKVYACEVTHQ | | |
| | LVKGFYPSDIAVEWESNGQPEN | | GLSSPVTKSFNR | | |
| | NYKTTPPVLDSDGSFALVSKLT | | GEC | | |
| | VDKSRWQQGNVFSCSVMHEAL | | | | |
| | HNRFTQKSLSLSPG | | | | |
| PS3B1923 | QVQLQQSGPRLVRPSQTLSLTC | 1206 | QSALTQPASVSG | 1207 | with |
| | AISGDSVFNNNAAWSWIRQSPS | | SPGQSITISCTGT | | CD3B376 |
| | RGLEWLGRTYYRSKWLYDYA | | SSNIGTYKFVSW | | arm |
| | VSVKSRITVNPDTSRNQFTLQL | | YQQHPDKAPKV | | (CD3B891 |
| | NSVTPEDTALYYCARGYSSSFD | | LLYEVSKRPSGV | | without K477 |
| | YWGQGTLVTVSSASTKGPSVFP | | SSRFSGSKSGNT | | or |
| | LAPSSKSTSGGTAALGCLVKDY | | ASLTISGLQAED | | CD3B2197 |
| | FPEPVTVSWNSGALTSGVHTFP | | QADYHCVSYAG | | with K477 in |
| | AVLQSSGLYSLSSVVTVPSSSLG | | SGTLLFGGGTKL | | HC1) |
| | TQTYICNVNHKPSNTKVDKKV | | TVLRTVAAPSVF | | |
| | EPKSCDKTHTCPPCPAPEAAGG | | IFPPSDEQLKSGT | | |
| | PSVFLFPPKPKDTLMISRTPEVT | | ASVVCLLNNFYP | | |
| | CVVVSVSHEDPEVKFNWYVDG | | REAKVQWKVDN | | |
| | VEVHNAKTKPREEQYNSTYRV | | ALQSGNSQESVT | | |
| | VSVLTVLHQDWLNGKEYKCK | | EQDSKDSTYSLS | | |
| | VSNKALPAPIEKTISKAKGQPRE | | STLTLSKADYEK | | |
| | PQVYVYPPSREEMTKNQVSLTC | | HKVYACEVTHQ | | |
| | LVKGFYPSDIAVEWESNGQPEN | | GLSSPVTKSFNR | | |
| | NYKTTPPVLDSDGSFALVSKLT | | GEC | | |
| | VDKSRWQQGNVFSCSVMHEAL | | | | |
| | HNRFTQKSLSLSPG | | | | |
| PS3B1924 | QVQLQQSGPRLVRPSQTLSLTC | 1208 | QSALTQPASVSG | 1209 | with |
| | AISGDSVFNNNAAWSWIRQSPS | | SPGQSITISCTGT | | CD3B376 |
| | RGLEWLGRTYYRSKWLYDYA | | SSNIGTYKFVSW | | arm |
| | VSVKSRITVNPDTSRNQFTLQL | | YQQHPDKAPKV | | (CD3B891 |
| | NSVTPEDTALYYCARGYSSSFD | | LLYEVSKRPSGV | | without K477 |
| | YWGQGTLVTVSSASTKGPSVFP | | SSRFSGSKSGNT | | or |
| | LAPSSKSTSGGTAALGCLVKDY | | ASLTISGLQAED | | CD3B2197 |
| | FPEPVTVSWNSGALTSGVHTFP | | QADYHCVSYAG | | with K477 in |
| | AVLQSSGLYSLSSVVTVPSSSLG | | SGTLLFGGGTKL | | HC1) |
| | TQTYICNVNHKPSNTKVDKKV | | TVLRTVAAPSVF | | |
| | EPKSCDKTHTCPPCPAPEAAGG | | IFPPSDEQLKSGT | | |
| | PSVFLFPPKPKDTLMISRTPEVT | | ASVVCLLNNFYP | | |
| | CVVVSVSHEDPEVKFNWYVDG | | REAKVQWKVDN | | |
| | VEVHNAKTKPREEQYNSTYRV | | ALQSGNSQESVT | | |
| | VSVLTVLHQDWLNGKEYKCK | | EQDSKDSTYSLS | | |
| | VSNKALPAPIEKTISKAKGQPRE | | STLTLSKADYEK | | |
| | PQVYVYPPSREEMTKNQVSLTC | | HKVYACEVTHQ | | |
| | LVKGFYPSDIAVEWESNGQPEN | | GLSSPVTKSFNR | | |
| | NYKTTPPVLDSDGSFALVSKLT | | GEC | | |
| | VDKSRWQQGNVFSCSVMHEAL | | | | |
| | HNRFTQKSLSLSPG | | | | |
| PS3B1925 | QVQLQQSGPRLVRPSQTLSLTC | 1210 | QSALTQPASVSG | 1211 | with |
| | AISGDSVFNNNAAWSWIRQSPS | | SPGQSITISCTGT | | CD3B376 |
| | RGLEWLGRTYYRSKWLYDYA | | SSNIGTYKFVSW | | arm |
| | VSVKSRITVNPDTSRNQFTLQL | | YQQHPDKAPKV | | (CD3B891 |
| | NSVTPEDTALYYCARGYSSSFD | | LLYEVSKRPSGV | | without K477 |
| | YWGQGTLVTVSSASTKGPSVFP | | SSRFSGSKSGNT | | or |
| | LAPSSKSTSGGTAALGCLVKDY | | ASLTISGLQAED | | CD3B2197 |
| | FPEPVTVSWNSGALTSGVHTFP | | QADYHCVSYAG | | with K477 in |
| | AVLQSSGLYSLSSVVTVPSSSLG | | SGTLLFGGGTKL | | HC1) |
| | TQTYICNVNHKPSNTKVDKKV | | TVLRTVAAPSVF | | |
| | EPKSCDKTHTCPPCPAPEAAGG | | IFPPSDEQLKSGT | | |
| | PSVFLFPPKPKDTLMISRTPEVT | | ASVVCLLNNFYP | | |
| | CVVVSVSHEDPEVKFNWYVDG | | REAKVQWKVDN | | |
| | VEVHNAKTKPREEQYNSTYRV | | ALQSGNSQESVT | | |
| | VSVLTVLHQDWLNGKEYKCK | | EQDSKDSTYSLS | | |
| | VSNKALPAPIEKTISKAKGQPRE | | STLTLSKADYEK | | |
| | PQVYVYPPSREEMTKNQVSLTC | | HKVYACEVTHQ | | |
| | LVKGFYPSDIAVEWESNGQPEN | | GLSSPVTKSFNR | | |
| | NYKTTPPVLDSDGSFALVSKLT | | GEC | | |
| | VDKSRWQQGNVFSCSVMHEAL | | | | |
| | HNRFTQKSLSLSPG | | | | |
| PS3B1926 | QVQLQQSGPRLVRPSQTLSLTC | 1212 | QSALTQPASVSG | 1213 | with |
| | AISGDSVFNNNAAWSWIRQSPS | | SPGQSITISCTGT | | CD3B376 |
| | RGLEWLGRTYYRSKWLYDYA | | SSNIGTYKFVSW | | arm |
| | VSVKSRITVNPDTSRNQFTLQL | | YQQHPDKAPKV | | (CD3B891 |
| | NSVTPEDTALYYCARGYSSSFD | | LLYEVSKRPSGV | | without K477 |
| | YWGQGTLVTVSSASTKGPSVFP | | SSRFSGSKSGNT | | or |
| | LAPSSKSTSGGTAALGCLVKDY | | ASLTISGLQAED | | CD3B2197 |
| | FPEPVTVSWNSGALTSGVHTFP | | QADYHCVSYAG | | with K477 in |
| | AVLQSSGLYSLSSVVTVPSSSLG | | SGTLLFGGGTKL | | HC1) |
| | TQTYICNVNHKPSNTKVDKKV | | TVLRTVAAPSVF | | |
| | EPKSCDKTHTCPPCPAPEAAGG | | IFPPSDEQLKSGT | | |
| | PSVFLFPPKPKDTLMISRTPEVT | | ASVVCLLNNFYP | | |
| | CVVVSVSHEDPEVKFNWYVDG | | REAKVQWKVDN | | |
| | VEVHNAKTKPREEQYNSTYRV | | ALQSGNSQESVT | | |
| | VSVLTVLHQDWLNGKEYKCK | | EQDSKDSTYSLS | | |
| | VSNKALPAPIEKTISKAKGQPRE | | STLTLSKADYEK | | |
| | PQVYVYPPSREEMTKNQVSLTC | | HKVYACEVTHQ | | |
| | LVKGFYPSDIAVEWESNGQPEN | | GLSSPVTKSFNR | | |
| | NYKTTPPVLDSDGSFALVSKLT | | GEC | | |
| | VDKSRWQQGNVFSCSVMHEAL | | | | |
| | HNRFTQKSLSLSPG | | | | |
| PS3B1927 | QVQLQQSGPRLVRPSQTLSLTC | 1214 | QSALTQPASVSG | 1215 | with |
| | AISGDSVFNNNAAWSWIRQSPS | | SPGQSITISCTGT | | CD3B376 |
| | RGLEWLGRTYYRSKWLYDYA | | SSNIGTYKFVSW | | arm |
| | VSVKSRITVNPDTSRNQFTLQL | | YQQHPDKAPKV | | (CD3B891 |
| | NSVTPEDTALYYCARGYSSSFD | | LLYEVSKRPSGV | | without K477 |
| | YWGQGTLVTVSSASTKGPSVFP | | SSRFSGSKSGNT | | or |
| | LAPSSKSTSGGTAALGCLVKDY | | ASLTISGLQAED | | CD3B2197 |
| | FPEPVTVSWNSGALTSGVHTFP | | QADYHCVSYAG | | with K477 in |
| | AVLQSSGLYSLSSVVTVPSSSLG | | SGTLLFGGGTKL | | HC1) |
| | TQTYICNVNHKPSNTKVDKKV | | TVLRTVAAPSVF | | |
| | EPKSCDKTHTCPPCPAPEAAGG | | IFPPSDEQLKSGT | | |
| | PSVFLFPPKPKDTLMISRTPEVT | | ASVVCLLNNFYP | | |
| | CVVVSVSHEDPEVKFNWYVDG | | REAKVQWKVDN | | |
| | VEVHNAKTKPREEQYNSTYRV | | ALQSGNSQESVT | | |
| | VSVLTVLHQDWLNGKEYKCK | | EQDSKDSTYSLS | | |
| | VSNKALPAPIEKTISKAKGQPRE | | STLTLSKADYEK | | |
| | PQVYVYPPSREEMTKNQVSLTC | | HKVYACEVTHQ | | |
| | LVKGFYPSDIAVEWESNGQPEN | | GLSSPVTKSFNR | | |
| | NYKTTPPVLDSDGSFALVSKLT | | GEC | | |
| | VDKSRWQQGNVFSCSVMHEAL | | | | |
| | HNRFTQKSLSLSPG | | | | |
| PS3B1928 | QVQLQQSGPRLVRPSQTLSLTC | 1216 | QSALTQPASVSG | 1217 | with |
| | AISGDSVFNNNAAWSWIRQSPS | | SPGQSITISCTGT | | CD3B376 |
| | RGLEWLGRTYYRSKWLYDYA | | SSNIGTYKFVSW | | arm |
| | VSVKSRITVNPDTSRNQFTLQL | | YQQHPDKAPKV | | (CD3B891 |
| | NSVTPEDTALYYCARGYSSSFD | | LLYEVSKRPSGV | | without K477 |
| | YWGQGTLVTVSSASTKGPSVFP | | SSRFSGSKSGNT | | or |
| | LAPSSKSTSGGTAALGCLVKDY | | ASLTISGLQAED | | CD3B2197 |
| | FPEPVTVSWNSGALTSGVHTFP | | QADYHCVSYAG | | with K477 in |
| | AVLQSSGLYSLSSVVTVPSSSLG | | SGTLLFGGGTKL | | HC1) |
| | TQTYICNVNHKPSNTKVDKKV | | TVLRTVAAPSVF | | |
| | EPKSCDKTHTCPPCPAPEAAGG | | IFPPSDEQLKSGT | | |
| | PSVFLFPPKPKDTLMISRTPEVT | | ASVVCLLNNFYP | | |
| | CVVVSVSHEDPEVKFNWYVDG | | REAKVQWKVDN | | |
| | VEVHNAKTKPREEQYNSTYRV | | ALQSGNSQESVT | | |
| | VSVLTVLHQDWLNGKEYKCK | | EQDSKDSTYSLS | | |
| | VSNKALPAPIEKTISKAKGQPRE | | STLTLSKADYEK | | |
| | PQVYVYPPSREEMTKNQVSLTC | | HKVYACEVTHQ | | |
| | LVKGFYPSDIAVEWESNGQPEN | | GLSSPVTKSFNR | | |
| | NYKTTPPVLDSDGSFALVSKLT | | GEC | | |
| | VDKSRWQQGNVFSCSVMHEAL | | | | |
| | HNRFTQKSLSLSPG | | | | |
| PSMB1041 | QITLKESGPTLVKPTQTLTLTCT | 1218 | DIVMTQSPDSLA | 1219 | Null CD3 |
| | FSGFSLSTSGMGVSWIRQPPGK | | VSLGERATINCR | | arm |
| | ALEWLAHIYWDDDKRYNPSLK | | ASQSVDYNGISY | | |
| | SRLTITKDTSKNQVVLTMTNM | | MHWYQQKPGQP | | |
| | DPVDTATYYCARLYGFTYGFA | | PKLLIYAASNPES | | |
| | YWGQGTLVTVSSASTKGPSVFP | | GVPDRFSGSGSG | | |
| | LAPSSKSTSGGTAALGCLVKDY | | TDFTLTISSLQAE | | |
| | FPEPVTVSWNSGALTSGVHTFP | | DVAVYYCQQIIE | | |
| | AVLQSSGLYSLSSVVTVPSSSLG | | DPWTFGQGTKV | | |
| | TQTYICNVNHKPSNTKVDKKV | | EIKRTVAAPSVFI | | |
| | EPKSCDKTHTCPPCPAPELLGG | | FPPSDEQLKSGT | | |
| | PSVFLFPPKPKDTLMISRTPEVT | | ASVVCLLNNFYP | | |
| | CVVVDVSHEDPEVKFNWYVD | | REAKVQWKVDN | | |
| | GVEVHNAKTKPREEQYNSTYR | | ALQSGNSQESVT | | |
| | VVSVLTVLHQDWLNGKEYKC | | EQDSKDSTYSLS | | |
| | KVSNKALPAPIEKTISKAKGQP | | STLTLSKADYEK | | |
| | REPQVYVYPPSREEMTKNQVSL | | HKVYACEVTHQ | | |
| | TCLVKGFYPSDIAVEWESNGQP | | GLSSPVTKSFNR | | |
| | ENNYKTTPPVLDSDGSFALVSK | | GEC | | |
| | LTVDKSRWQQGNVFSCSVMHE | | | | |
| | ALHNRFTQKSLSLSPG | | | | |
| PSMB1045 | QITLKESGPTLVKPTQTLTLTCT | 1220 | DIVMTQSPDSLA | 1221 | Null CD3 |
| | FSGFSLSTSGMGVSWIRQPPGK | | VSLGERATINCR | | arm |
| | ALEWLAHIYWDDDKRYNPSLK | | ASQSVDYNGISY | | |
| | SRLTITKDTSKNQVVLTMTNM | | MHWYQQKPGQP | | |
| | DPVDTATYYCARLYGFTYGFA | | PKLLIYAASNPES | | |
| | YWGQGTLVTVSSASTKGPSVFP | | GVPDRFSGSGSG | | |
| | LAPSSKSTSGGTAALGCLVKDY | | TDFTLTISSLQAE | | |
| | FPEPVTVSWNSGALTSGVHTFP | | DVAVYYCQQIIE | | |
| | AVLQSSGLYSLSSVVTVPSSSLG | | DPWTFGQGTKV | | |
| | TQTYICNVNHKPSNTKVDKKV | | EIKRTVAAPSVFI | | |
| | EPKSCDKTHTCPPCPAPELLGG | | FPPSDEQLKSGT | | |
| | PSVFLFPPKPKDTLMISRTPEVT | | ASVVCLLNNFYP | | |
| | CVVVDVSHEDPEVKFNWYVD | | REAKVQWKVDN | | |
| | GVEVHNAKTKPREEQYNSTYR | | ALQSGNSQESVT | | |
| | VVSVLTVLHQDWLNGKEYKC | | EQDSKDSTYSLS | | |
| | KVSNKALPAPIEKTISKAKGQP | | STLTLSKADYEK | | |
| | REPQVYVYPPSREEMTKNQVSL | | HKVYACEVTHQ | | |
| | TCLVKGFYPSDIAVEWESNGQP | | GLSSPVTKSFNR | | |
| | ENNYKTTPPVLDSDGSFALVSK | | GEC | | |
| | LTVDKSRWQQGNVFSCSVMHE | | | | |
| | ALHNRFTQKSLSLSPG | | | | |
| PSMB1047 | QITLKESGPTLVKPTQTLTLTCT | 1222 | DIVMTQSPDSLA | 1223 | Null CD3 |
| | FSGFSLSTSGMGVSWIRQPPGK | | VSLGERATINCR | | arm |
| | ALEWLAHIYWDDDKRYNPSLK | | ASQSVDYNGISY | | |
| | SRLTITKDTSKNQVVLTMTNM | | MHWYQQKPGQP | | |
| | DPVDTATYYCARLYGFTYGFA | | PKLLIYAASNPES | | |
| | YWGQGTLVTVSSASTKGPSVFP | | GVPDRFSGSGSG | | |
| | LAPSSKSTSGGTAALGCLVKDY | | TDFTLTISSLQAE | | |
| | FPEPVTVSWNSGALTSGVHTFP | | DVAVYYCQQIIE | | |
| | AVLQSSGLYSLSSVVTVPSSSLG | | DPWTFGQGTKV | | |
| | TQTYICNVNHKPSNTKVDKKV | | EIKRTVAAPSVFI | | |
| | EPKSCDKTHTCPPCPAPELLGG | | FPPSDEQLKSGT | | |
| | PSVFLFPPKPKDTLMISRTPEVT | | ASVVCLLNNFYP | | |
| | CVVVDVSHEDPEVKFNWYVD | | REAKVQWKVDN | | |
| | GVEVHNAKTKPREEQYNSTYR | | ALQSGNSQESVT | | |
| | VVSVLTVLHQDWLNGKEYKC | | EQDSKDSTYSLS | | |
| | KVSNKALPAPIEKTISKAKGQP | | STLTLSKADYEK | | |
| | REPQVYVYPPSREEMTKNQVSL | | HKVYACEVTHQ | | |
| | TCLVKGFYPSDIAVEWESNGQP | | GLSSPVTKSFNR | | |
| | ENNYKTTPPVLDSDGSFALVSK | | GEC | | |
| | LTVDKSRWQQGNVFSCSVMHE | | | | |
| | ALHNRFTQKSLSLSPG | | | | |
| PSMB1049 | QITLKESGPTLVKPTQTLTLTCT | 1224 | DIVMTQSPDSLA | 1225 | Null CD3 |
| | FSGFSLSTSGMGVSWIRQPPGK | | VSLGERATINCR | | arm |
| | ALEWLAHIYWDDDKRYNPSLK | | ASQSVDYNGISY | | |
| | SRLTITKDTSKNQVVLTMTNM | | MHWYQQKPGQP | | |
| | DPVDTATYYCARLYGFTYGFA | | PKLLIYAASNPES | | |
| | YWGQGTLVTVSSASTKGPSVFP | | GVPDRFSGSGSG | | |
| | LAPSSKSTSGGTAALGCLVKDY | | TDFTLTISSLQAE | | |
| | FPEPVTVSWNSGALTSGVHTFP | | DVAVYYCQQIIE | | |
| | AVLQSSGLYSLSSVVTVPSSSLG | | DPWTFGQGTKV | | |
| | TQTYICNVNHKPSNTKVDKKV | | EIKRTVAAPSVFI | | |
| | EPKSCDKTHTCPPCPAPELLGG | | FPPSDEQLKSGT | | |
| | PSVFLFPPKPKDTLMISRTPEVT | | ASVVCLLNNFYP | | |
| | CVVVDVSHEDPEVKFNWYVD | | REAKVQWKVDN | | |
| | GVEVHNAKTKPREEQYNSTYR | | ALQSGNSQESVT | | |
| | VVSVLTVLHQDWLNGKEYKC | | EQDSKDSTYSLS | | |
| | KVSNKALPAPIEKTISKAKGQP | | STLTLSKADYEK | | |
| | REPQVYVYPPSREEMTKNQVSL | | HKVYACEVTHQ | | |
| | TCLVKGFYPSDIAVEWESNGQP | | GLSSPVTKSFNR | | |
| | ENNYKTTPPVLDSDGSFALVSK | | GEC | | |
| | LTVDKSRWQQGNVFSCSVMHE | | | | |
| | ALHNRFTQKSLSLSPG | | | | |
| PSMB1051 | QITLKESGPTLVKPTQTLTLTCT | 1226 | DIVMTQSPDSLA | 1227 | Null CD3 |
| | FSGFSLSTSGMGVSWIRQPPGK | | VSLGERATINCR | | arm |
| | ALEWLAHIYWDDDKRYNPSLK | | ASQSVDYNGISY | | |
| | SRLTITKDTSKNQVVLTMTNM | | MHWYQQKPGQP | | |
| | DPVDTATYYCARLYGFTYGFA | | PKLLIYAASNPES | | |
| | YWGQGTLVTVSSASTKGPSVFP | | GVPDRFSGSGSG | | |
| | LAPSSKSTSGGTAALGCLVKDY | | TDFTLTISSLQAE | | |
| | FPEPVTVSWNSGALTSGVHTFP | | DVAVYYCQQIIE | | |
| | AVLQSSGLYSLSSVVTVPSSSLG | | DPWTFGQGTKV | | |
| | TQTYICNVNHKPSNTKVDKKV | | EIKRTVAAPSVFI | | |
| | EPKSCDKTHTCPPCPAPELLGG | | FPPSDEQLKSGT | | |
| | PSVFLFPPKPKDTLMISRTPEVT | | ASVVCLLNNFYP | | |
| | CVVVDVSHEDPEVKFNWYVD | | REAKVQWKVDN | | |
| | GVEVHNAKTKPREEQYNSTYR | | ALQSGNSQESVT | | |
| | VVSVLTVLHQDWLNGKEYKC | | EQDSKDSTYSLS | | |
| | KVSNKALPAPIEKTISKAKGQP | | STLTLSKADYEK | | |
| | REPQVYVYPPSREEMTKNQVSL | | HKVYACEVTHQ | | |
| | TCLVKGFYPSDIAVEWESNGQP | | GLSSPVTKSFNR | | |
| | ENNYKTTPPVLDSDGSFALVSK | | GEC | | |
| | LTVDKSRWQQGNVFSCSVMHE | | | | |
| | ALHNRFTQKSLSLSPG | | | | |
| PSMB1052 | QITLKESGPTLVKPTQTLTLTCT | 1228 | DIVMTQSPDSLA | 1229 | Null CD3 |
| | FSGFSLSTSGMGVSWIRQPPGK | | VSLGERATINCR | | arm |
| | ALEWLAHIYWDDDKRYNPSLK | | ASQSVDYNGISY | | |
| | SRLTITKDTSKNQVVLTMTNM | | MHWYQQKPGQP | | |
| | DPVDTATYYCARLYGFTYGFA | | PKLLIYAASNPES | | |
| | YWGQGTLVTVSSASTKGPSVFP | | GVPDRFSGSGSG | | |
| | LAPSSKSTSGGTAALGCLVKDY | | TDFTLTISSLQAE | | |
| | FPEPVTVSWNSGALTSGVHTFP | | DVAVYYCQQIIE | | |
| | AVLQSSGLYSLSSVVTVPSSSLG | | DPWTFGQGTKV | | |
| | TQTYICNVNHKPSNTKVDKKV | | EIKRTVAAPSVFI | | |
| | EPKSCDKTHTCPPCPAPELLGG | | FPPSDEQLKSGT | | |
| | PSVFLFPPKPKDTLMISRTPEVT | | ASVVCLLNNFYP | | |
| | CVVVDVSHEDPEVKFNWYVD | | REAKVQWKVDN | | |
| | GVEVHNAKTKPREEQYNSTYR | | ALQSGNSQESVT | | |
| | VVSVLTVLHQDWLNGKEYKC | | EQDSKDSTYSLS | | |
| | KVSNKALPAPIEKTISKAKGQP | | STLTLSKADYEK | | |
| | REPQVYVYPPSREEMTKNQVSL | | HKVYACEVTHQ | | |
| | TCLVKGFYPSDIAVEWESNGQP | | | | |
| | ENNYKTTPPVLDSDGSFALVSK | | GLSSPVTKSFNR | | |
| | LTVDKSRWQQGNVFSCSVMHE | | GEC | | |
| | ALHNRFTQKSLSLSPG | | | | |
| PSMB1060 | QITLKESGPTLVKPTQTLTLTCT | 1230 | DIVMTQSPDSLA | 1231 | Null CD3 |
| | FSGFSLSTSGMGVSWIRQPPGK | | VSLGERATINCR | | arm |
| | ALEWLAHIYWDDDKRYNPSLK | | ASQSVDYNGISY | | |
| | SRLTITKDTSKNQVVLTMTNM | | MHWYQQKPGQP | | |
| | DPVDTATYYCARLYGFTYGFA | | PKLLIYAASNPES | | |
| | YWGQGTLVTVSSASTKGPSVFP | | GVPDRFSGSGSG | | |
| | LAPSSKSTSGGTAALGCLVKDY | | TDFTLTISSLQAE | | |
| | FPEPVTVSWNSGALTSGVHTFP | | DVAVYYCQQIIE | | |
| | AVLQSSGLYSLSSVVTVPSSSLG | | DPWTFGQGTKV | | |
| | TQTYICNVNHKPSNTKVDKKV | | EIKRTVAAPSVFI | | |
| | EPKSCDKTHTCPPCPAPELLGG | | FPPSDEQLKSGT | | |
| | PSVFLFPPKPKDTLMISRTPEVT | | ASVVCLLNNFYP | | |
| | CVVVDVSHEDPEVKFNWYVD | | REAKVQWKVDN | | |
| | GVEVHNAKTKPREEQYNSTYR | | ALQSGNSQESVT | | |
| | VVSVLTVLHQDWLNGKEYKC | | EQDSKDSTYSLS | | |
| | KVSNKALPAPIEKTISKAKGQP | | STLTLSKADYEK | | |
| | REPQVYVYPPSREEMTKNQVSL | | HKVYACEVTHQ | | |
| | TCLVKGFYPSDIAVEWESNGQP | | GLSSPVTKSFNR | | |
| | ENNYKTTPPVLDSDGSFALVSK | | GEC | | |
| | LTVDKSRWQQGNVFSCSVMHE | | | | |
| | ALHNRFTQKSLSLSPG | | | | |
| PSMB1068 | QITLKESGPTLVKPTQTLTLTCT | 1232 | DIVMTQSPDSLA | 1233 | Null CD3 |
| | FSGFSLSTSGMGVSWIRQPPGK | | VSLGERATINCR | | arm |
| | ALEWLAHIYWDDDKRYNPSLK | | ASQSVDYNGISY | | |
| | SRLTITKDTSKNQVVLTMTNM | | MHWYQQKPGQP | | |
| | DPVDTATYYCARLYGFTYGFA | | PKLLIYAASNPES | | |
| | YWGQGTLVTVSSASTKGPSVFP | | GVPDRFSGSGSG | | |
| | LAPSSKSTSGGTAALGCLVKDY | | TDFTLTISSLQAE | | |
| | FPEPVTVSWNSGALTSGVHTFP | | DVAVYYCQQIIE | | |
| | AVLQSSGLYSLSSVVTVPSSSLG | | DPWTFGQGTKV | | |
| | TQTYICNVNHKPSNTKVDKKV | | EIKRTVAAPSVFI | | |
| | EPKSCDKTHTCPPCPAPELLGG | | FPPSDEQLKSGT | | |
| | PSVFLFPPKPKDTLMISRTPEVT | | ASVVCLLNNFYP | | |
| | CVVVDVSHEDPEVKFNWYVD | | REAKVQWKVDN | | |
| | GVEVHNAKTKPREEQYNSTYR | | ALQSGNSQESVT | | |
| | VVSVLTVLHQDWLNGKEYKC | | EQDSKDSTYSLS | | |
| | KVSNKALPAPIEKTISKAKGQP | | STLTLSKADYEK | | |
| | REPQVYVYPPSREEMTKNQVSL | | HKVYACEVTHQ | | |
| | TCLVKGFYPSDIAVEWESNGQP | | GLSSPVTKSFNR | | |
| | ENNYKTTPPVLDSDGSFALVSK | | GEC | | |
| | LTVDKSRWQQGNVFSCSVMHE | | | | |
| | ALHNRFTQKSLSLSPG | | | | |
| PSMB1069 | QITLKESGPTLVKPTQTLTLTCT | 1234 | DIVMTQSPDSLA | 1235 | Null CD3 |
| | FSGFSLSTSGMGVSWIRQPPGK | | VSLGERATINCR | | arm |
| | ALEWLAHIYWDDDKRYNPSLK | | ASQSVDYNGISY | | |
| | SRLTITKDTSKNQVVLTMTNM | | MHWYQQKPGQP | | |
| | DPVDTATYYCARLYGFTYGFA | | PKLLIYAASNPES | | |
| | YWGQGTLVTVSSASTKGPSVFP | | GVPDRFSGSGSG | | |
| | LAPSSKSTSGGTAALGCLVKDY | | TDFTLTISSLQAE | | |
| | FPEPVTVSWNSGALTSGVHTFP | | DVAVYYCQQIIE | | |
| | AVLQSSGLYSLSSVVTVPSSSLG | | DPWTFGQGTKV | | |
| | TQTYICNVNHKPSNTKVDKKV | | EIKRTVAAPSVFI | | |
| | EPKSCDKTHTCPPCPAPELLGG | | FPPSDEQLKSGT | | |
| | PSVFLFPPKPKDTLMISRTPEVT | | ASVVCLLNNFYP | | |
| | CVVVDVSHEDPEVKFNWYVD | | REAKVQWKVDN | | |
| | GVEVHNAKTKPREEQYNSTYR | | ALQSGNSQESVT | | |
| | VVSVLTVLHQDWLNGKEYKC | | EQDSKDSTYSLS | | |
| | KVSNKALPAPIEKTISKAKGQP | | STLTLSKADYEK | | |
| | REPQVYVYPPSREEMTKNQVSL | | HKVYACEVTHQ | | |
| | TCLVKGFYPSDIAVEWESNGQP | | GLSSPVTKSFNR | | |
| | ENNYKTTPPVLDSDGSFALVSK | | GEC | | |
| | LTVDKSRWQQGNVFSCSVMHE | | | | |
| | ALHNRFTQKSLSLSPG | | | | |
| PSMB1075 | QITLKESGPTLVKPTQTLTLTCT | 1236 | DIVMTQSPDSLA | 1237 | Null CD3 |
| | FSGFSLSTSGMGVSWIRQPPGK | | VSLGERATINCR | | arm |
| | ALEWLAHIYWDDDKRYNPSLK | | ASQSVDYNGISY | | |
| | SRLTITKDTSKNQVVLTMTNM | | MHWYQQKPGQP | | |
| | DPVDTATYYCARLYGFTYGFA | | PKLLIYAASNPES | | |
| | YWGQGTLVTVSSASTKGPSVFP | | GVPDRFSGSGSG | | |
| | LAPSSKSTSGGTAALGCLVKDY | | TDFTLTISSLQAE | | |
| | FPEPVTVSWNSGALTSGVHTFP | | DVAVYYCQQIIE | | |
| | AVLQSSGLYSLSSVVTVPSSSLG | | DPWTFGQGTKV | | |
| | TQTYICNVNHKPSNTKVDKKV | | EIKRTVAAPSVFI | | |
| | EPKSCDKTHTCPPCPAPELLGG | | FPPSDEQLKSGT | | |
| | PSVFLFPPKPKDTLMISRTPEVT | | ASVVCLLNNFYP | | |
| | CVVVDVSHEDPEVKFNWYVD | | REAKVQWKVDN | | |
| | GVEVHNAKTKPREEQYNSTYR | | ALQSGNSQESVT | | |
| | VVSVLTVLHQDWLNGKEYKC | | EQDSKDSTYSLS | | |
| | KVSNKALPAPIEKTISKAKGQP | | STLTLSKADYEK | | |
| | REPQVYVYPPSREEMTKNQVSL | | HKVYACEVTHQ | | |
| | TCLVKGFYPSDIAVEWESNGQP | | GLSSPVTKSFNR | | |
| | ENNYKTTPPVLDSDGSFALVSK | | GEC | | |
| | LTVDKSRWQQGNVFSCSVMHE | | | | |
| | ALHNRFTQKSLSLSPG | | | | |
| PSMB2908 | QITLKESGPTLVKPTQTLTLTCT | 1238 | DIVMTQSPDSLA | 1239 | Null CD3 |
| | FSGFSLSTSGMGVSWIRQPPGK | | VSLGERATINCR | | arm |
| | ALEWLAHIYWDDDKRYNPSLK | | ASQSVDYNGISY | | |
| | SRLTITKDTSKNQVVLTMTNM | | MHWYQQKPGQP | | |
| | DPVDTATYYCARLYGFTYGFA | | PKLLIYAASNPES | | |
| | YWGQGTLVTVSSASTKGPSVFP | | GVPDRFSGSGSG | | |
| | LAPSSKSTSGGTAALGCLVKDY | | TDFTLTISSLQAE | | |
| | FPEPVTVSWNSGALTSGVHTFP | | DVAVYYCQQIIE | | |
| | AVLQSSGLYSLSSVVTVPSSSLG | | DPWTFGQGTKV | | |
| | TQTYICNVNHKPSNTKVDKKV | | EIKRTVAAPSVFI | | |
| | EPKSCDKTHTCPPCPAPEAAGG | | FPPSDEQLKSGT | | |
| | PSVFLFPPKPKDTLMISRTPEVT | | ASVVCLLNNFYP | | |
| | CVVVSVSHEDPEVKFNWYVDG | | REAKVQWKVDN | | |
| | VEVHNAKTKPREEQYNSTYRV | | ALQSGNSQESVT | | |
| | VSVLTVLHQDWLNGKEYKCK | | EQDSKDSTYSLS | | |
| | VSNKALPAPIEKTISKAKGQPRE | | STLTLSKADYEK | | |
| | PQVYVYPPSREEMTKNQVSLTC | | HKVYACEVTHQ | | |
| | LVKGFYPSDIAVEWESNGQPEN | | GLSSPVTKSFNR | | |
| | NYKTTPPVLDSDGSFALVSKLT | | GEC | | |
| | VDKSRWQQGNVFSCSVMHEAL | | | | |
| | HNHYTQKSLSLSPG | | | | |
| PSMB2909 | QITLKESGPTLVKPTQTLTLTCT | 1240 | DIVMTQSPDSLA | 1241 | Null CD3 |
| | FSGFSLSTSGMGVSWIRQPPGK | | VSLGERATINCR | | arm |
| | ALEWLAHIYWDDDKRYNPSLK | | ASQSVDYNGISY | | |
| | SRLTITKDTSKNQVVLTMTNM | | MHWYQQKPGQP | | |
| | DPVDTATYYCARLYGFTYGFA | | PKLLIYAASNPES | | |
| | YWGQGTLVTVSSASTKGPSVFP | | GVPDRFSGSGSG | | |
| | LAPSSKSTSGGTAALGCLVKDY | | TDFTLTISSLQAE | | |
| | FPEPVTVSWNSGALTSGVHTFP | | DVAVYYCQQIIE | | |
| | AVLQSSGLYSLSSVVTVPSSSLG | | DPWTFGQGTKV | | |
| | TQTYICNVNHKPSNTKVDKKV | | EIKRTVAAPSVFI | | |
| | EPKSCDKTHTCPPCPAPEAAGG | | FPPSDEQLKSGT | | |
| | PSVFLFPPKPKDTLMISRTPEVT | | ASVVCLLNNFYP | | |
| | CVVVSVSHEDPEVKFNWYVDG | | REAKVQWKVDN | | |
| | VEVHNAKTKPREEQYNSTYRV | | ALQSGNSQESVT | | |
| | VSVLTVLHQDWLNGKEYKCK | | EQDSKDSTYSLS | | |
| | VSNKALPAPIEKTISKAKGQPRE | | STLTLSKADYEK | | |
| | PQVYVYPPSREEMTKNQVSLTC | | HKVYACEVTHQ | | |
| | LVKGFYPSDIAVEWESNGQPEN | | GLSSPVTKSFNR | | |
| | NYKTTPPVLDSDGSFALVSKLT | | GEC | | |
| | VDKSRWQQGNVFSCSVMHEAL | | | | |
| | HNHYTQKSLSLSPG | | | | |
| PS3B1391 | EIVLTQSPATLSASPGERVTLSC | 1455 | NA | 1456 | CD3B2030 |
| | SASSSVSYMNWYQQKPGQAPR | | | | |
| | RWIYDSSKLASGVPARFSGSGS | | | | |
| | GRDYTLTISSLEPEDFAVYYCQ | | | | |
| | QWSRNPPTFGGGTKVEIKGGSE | | | | |
| | GKSSGSGSESKSTGGSQVQLVQ | | | | |
| | SGAEVKKPGSSVKVSCKASGY | | | | |
| | TFTRSTMHWVKQAPGQGLEWI | | | | |
| | GYINPSSAYTNYNQKFQGRVTL | | | | |
| | TADKSTSTAYMELSSLRSEDTA | | | | |
| | VYYCASPQVHYDYAGFPYWG | | | | |
| | QGTLVTVSSEPKSSDKTHTCPP | | | | |
| | CPAPEAAGGPSVFLFPPKPKDT | | | | |
| | LMISRTPEVTCVVVSVSHEDPE | | | | |
| | VKFNWYVDGVEVHNAKTKPR | | | | |
| | EEQYNSTYRVVSVLTVLHQDW | | | | |
| | LNGKEYKCKVSNKALPAPIEKT | | | | |
| | ISKAKGQPREPQVYTLPPSREE | | | | |
| | MTKNQVSLWCLVKGFYPSDIA | | | | |
| | VEWESNGQPENNYKTTPPVLD | | | | |
| | SDGSFFLYSKLTVDKSRWQQG | | | | |
| | NVFSCSVMHEALHNHYTQKSL | | | | |
| | SLSPGK | | | | |
| PS3B1396 | EIVLTQSPATLSASPGERVTLSC | 1457 | NA | 1458 | CD3B2030 |
| | SASSSVSYMNWYQQKPGQAPR | | | | |
| | RWIYDSSKLASGVPARFSGSGS | | | | |
| | GRDYTLTISSLEPEDFAVYYCQ | | | | |
| | QWSRNPPTFGGGTKVEIKGGSE | | | | |
| | GKSSGSGSESKSTGGSQVQLVQ | | | | |
| | SGAEVKKPGSSVKVSCKASGY | | | | |
| | TFTRSTMHWVKQAPGQGLEWI | | | | |
| | GYINPSSAYTNYNQKFQGRVTL | | | | |
| | TADKSTSTAYMELSSLRSEDTA | | | | |
| | VYYCASPQVHYDYAGFPYWG | | | | |
| | QGTLVTVSSEPKSSDKTHTCPP | | | | |
| | CPAPEAAGGPSVFLFPPKPKDT | | | | |
| | LMISRTPEVTCVVVSVSHEDPE | | | | |
| | VKFNWYVDGVEVHNAKTKPR | | | | |
| | EEQYNSTYRVVSVLTVLHQDW | | | | |
| | LNGKEYKCKVSNKALPAPIEKT | | | | |
| | ISKAKGQPREPQVYTLPPSREE | | | | |
| | MTKNQVSLWCLVKGFYPSDIA | | | | |
| | VEWESNGQPENNYKTTPPVLD | | | | |
| | SDGSFFLYSKLTVDKSRWQQG | | | | |
| | NVFSCSVMHEALHNHYTQKSL | | | | |
| | SLSPGK | | | | |

TABLE 60
PSMA x CD3 Bispecific Antibodies: PSMA Arm Descriptions

| | | SEQ | | SEQ | PSMA Arm |
|---|---|---|---|---|---|
| Name | HC2 | ID NO. | LC2 | ID NO. | Description |
| PS3B1353 | EVQLVESGGGLVQPGGSLRLSC | 1242 | QSVLTQPPSVSA | 1243 | PSMB896 |
| | AASGFTFSSYAMSWVRQAPGK | | APGQKVTISCSG | | |
| | GLEWVSAISGGIGSTYYADSVK | | SSSNIGINYVSW | | |
| | GRFTISRDNSKNTLWLQMNSLR | | YQQLPGTAPKLL | | |
| | AEDTAVYYCAKDGVGATPYYF | | IYDNNKRPSGIP | | |
| | DYWGQGTLVTVSSASTKGPSV | | DRFSGSKSGTSA | | |
| | FPLAPSSKSTSGGTAALGCLVK | | TLGITGLQTGDE | | |
| | DYFPEPVTVSWNSGALTSGVHT | | ADYYCGTWDSS | | |
| | FPAVLQSSGLYSLSSVVTVPSSS | | LSAVVFGGGTKL | | |
| | LGTQTYICNVNHKPSNTKVDK | | TVLGQPKAAPSV | | |
| | KVEPKSCDKTHTCPPCPAPEAA | | TLFPPSSEELQAN | | |
| | GGPSVFLFPPKPKDTLMISRTPE | | KATLVCLISDFY | | |
| | VTCVVVSVSHEDPEVKFNWYV | | PGAVTVAWKAD | | |
| | DGVEVHNAKTKPREEQYNSTY | | SSPVKAGVETTT | | |
| | RVVSVLTVLHQDWLNGKEYKC | | PSKQSNNKYAAS | | |
| | KVSNKALPAPIEKTISKAKGQP | | SYLSLTPEQWKS | | |
| | REPQVYTLPPSREEMTKNQVSL | | HRSYSCQVTHEG | | |
| | TCLVKGFYPSDIAVEWESNGQP | | STVEKTVAPTEC | | |
| | ENNYKTTPPVLDSDGSFFLYSR | | S | | |
| | LTVDKSRWQQGNVFSCSVMHE | | | | |
| | ALHNHYTQKSLSLSPGK | | | | |
| PS3B1505 | EVQLVESGGGLVQPGGSLRLSC | 1244 | QSVLTQPPSVSA | 1245 | PSMB896- |
| | AASGFTFSSYAMSWVRQAPGK | | APGQKVTISCSG | | G100A |
| | GLEWVSAISGGIGSTYYADSVK | | SSSNIGINYVSW | | |
| | GRFTISRDNSKNTLWLQMNSLR | | YQQLPGTAPKLL | | |
| | AEDTAVYYCAKDAVGATPYYF | | IYDNNKRPSGIP | | |
| | DYWGQGTLVTVSSASTKGPSV | | DRFSGSKSGTSA | | |
| | FPLAPSSKSTSGGTAALGCLVK | | TLGITGLQTGDE | | |
| | DYFPEPVTVSWNSGALTSGVHT | | ADYYCGTWDSS | | |
| | FPAVLQSSGLYSLSSVVTVPSSS | | LSAVVFGGGTKL | | |
| | LGTQTYICNVNHKPSNTKVDK | | TVLGQPKAAPSV | | |
| | KVEPKSCDKTHTCPPCPAPEAA | | TLFPPSSEELQAN | | |
| | GGPSVFLFPPKPKDTLMISRTPE | | KATLVCLISDFY | | |
| | VTCVVVSVSHEDPEVKFNWYV | | PGAVTVAWKAD | | |
| | DGVEVHNAKTKPREEQYNSTY | | SSPVKAGVETTT | | |
| | RVVSVLTVLHQDWLNGKEYKC | | PSKQSNNKYAAS | | |
| | KVSNKALPAPIEKTISKAKGQP | | SYLSLTPEQWKS | | |
| | REPQVYTLPPSREEMTKNQVSL | | HRSYSCQVTHEG | | |
| | TCLVKGFYPSDIAVEWESNGQP | | STVEKTVAPTEC | | |
| | ENNYKTTPPVLDSDGSFFLYSR | | S | | |
| | LTVDKSRWQQGNVFSCSVMHE | | | | |
| | ALHNHYTQKSLSLSPGK | | | | |
| PS3B1508 | EVQLVESGGGLVQPGGSLRLSC | 1246 | QSVLTQPPSVSA | 1247 | PSMB896- |
| | AASGFTFSSYAMSWVRQAPGK | | APGQKVTISCSG | | G100A |
| | GLEWVSAISGGIGSTYYADSVK | | SSSNIGINYVSW | | |
| | GRFTISRDNSKNTLWLQMNSLR | | YQQLPGTAPKLL | | |
| | AEDTAVYYCAKDAVGATPYYF | | IYDNNKRPSGIP | | |
| | DYWGQGTLVTVSSASTKGPSV | | DRFSGSKSGTSA | | |
| | FPLAPSSKSTSGGTAALGCLVK | | TLGITGLQTGDE | | |
| | DYFPEPVTVSWNSGALTSGVHT | | ADYYCGTWDSS | | |
| | FPAVLQSSGLYSLSSVVTVPSSS | | LSAVVFGGGTKL | | |
| | LGTQTYICNVNHKPSNTKVDK | | TVLGQPKAAPSV | | |
| | KVEPKSCDKTHTCPPCPAPEAA | | TLFPPSSEELQAN | | |
| | GGPSVFLFPPKPKDTLMISRTPE | | KATLVCLISDFY | | |
| | VTCVVVSVSHEDPEVKFNWYV | | PGAVTVAWKAD | | |
| | DGVEVHNAKTKPREEQYNSTY | | SSPVKAGVETTT | | |
| | RVVSVLTVLHQDWLNGKEYKC | | PSKQSNNKYAAS | | |
| | KVSNKALPAPIEKTISKAKGQP | | SYLSLTPEQWKS | | |
| | REPQVYTLPPSREEMTKNQVSL | | HRSYSCQVTHEG | | |
| | SCAVKGFYPSDIAVEWESNGQP | | STVEKTVAPTEC | | |
| | ENNYKTTPPVLDSDGSFFLVSK | | S | | |
| | LTVDKSRWQQGNVFSCSVMHE | | | | |
| | ALHNRFTQKSLSLSPGK | | | | |
| PS3B1917 | SYELMQPPSVSVSPGQTARITCS | 1248 | NA | 1249 | PSMA_P72 |
| | GDALPKQYAYWYQQKPGQAP | | | | A10-HC- |
| | VLVIYKDSERPSGIPVRFSGSSS | | | | G54E |
| | GTTVTLTITGVQAEDEADYYCQ | | | | |
| | SADSSGTYVFGTGTKVTVLGGS | | | | |
| | EGKSSGSGSESKSTGGSQVQLV | | | | |
| | ESGGGVVQPGRSLRLSCAASGF | | | | |
| | TFSSYNMNWVRQAPGKGLEW | | | | |
| | VAIIYYDESNKYYADSVKGRFT | | | | |
| | ISRDISKNTLYLQMNSLRAEDT | | | | |
| | AVYYCARERGRDYYGMDVWG | | | | |
| | QGTTVTVSSEPKSSDKTHTCPP | | | | |
| | CPAPEAAGGPSVFLFPPKPKDT | | | | |
| | LMISRTPEVTCVVVSVSHEDPE | | | | |
| | VKFNWYVDGVEVHNAKTKPR | | | | |
| | EEQYNSTYRVVSVLTVLHQDW | | | | |
| | LNGKEYKCKVSNKALPAPIEKT | | | | |
| | ISKAKGQPREPQVYVLPPSREE | | | | |
| | MTKNQVSLLCLVKGFYPSDIAV | | | | |
| | EWESNGQPENNYLTWPPVLDS | | | | |
| | DGSFFLYSKLTVDKSRWQQGN | | | | |
| | VFSCSVMHEALHNHYTQKSLS | | | | |
| | LSPG | | | | |
| PS3B1918 | QSVLTQPASVSGSPGQSITISCT | 1250 | NA | 1251 | PSMA_P_72_ |
| | GTSSDVGGYNYVSWYQQHPG | | | | D01-HC- |
| | KAPKLMIYEVSNRPSGVSNRFS | | | | D95E |
| | GSKSGNTASLTISGLQAEDEAD | | | | |
| | YYCSSYTSSYTYVFGTGTKLTV | | | | |
| | LGGSEGKSSGSGSESKSTGGSE | | | | |
| | VQLVESGGDLVQPGGSLRLSCA | | | | |
| | ASGFTFNNYNMNWVRQAPGK | | | | |
| | GLEWVSHISTSSSNKYYADSVK | | | | |
| | GRFSISRDIAKNSMYLQMNSLR | | | | |
| | DEDTAVYYCAREGVGADYGD | | | | |
| | YYYYGMDVWGQGTTVTVSSE | | | | |
| | PKSSDKTHTCPPCPAPEAAGGP | | | | |
| | SVFLFPPKPKDTLMISRTPEVTC | | | | |
| | VVVSVSHEDPEVKFNWYVDGV | | | | |
| | EVHNAKTKPREEQYNSTYRVV | | | | |
| | SVLTVLHQDWLNGKEYKCKVS | | | | |
| | NKALPAPIEKTISKAKGQPREPQ | | | | |
| | VYVLPPSREEMTKNQVSLLCLV | | | | |
| | KGFYPSDIAVEWESNGQPENNY | | | | |
| | LTWPPVLDSDGSFFLYSKLTVD | | | | |
| | KSRWQQGNVFSCSVMHEALHN | | | | |
| | HYTQKSLSLSPG | | | | |
| PS3B1919 | EIVLTQSPGTLSVSPGERATLSC | 1252 | NA | 1253 | PSMA_P75_ |
| | RASQSVRSNLAWYQQKPGQAP | | | | F01 |
| | RLLIYGASTRATGIPARFSGSGS | | | | |
| | GTEFTLTISSLQSEDFAVYYCHQ | | | | |
| | YNDWPPYTFGQGTKLEIKGGSE | | | | |
| | GKSSGSGSESKSTGGSQVQLQE | | | | |
| | SGGGVVQPGRSLRLSCAASGFT | | | | |
| | FSTYGMHWVRQAPGKGLEWV | | | | |
| | AFISYDGSNKYYADSVKGRFTI | | | | |
| | SRDNSKHTLYLQMNSLRAEDT | | | | |
| | AVYYCAGRDNLRFLEWFMDV | | | | |
| | WGQGTTVTVSSEPKSSDKTHTC | | | | |
| | PPCPAPEAAGGPSVFLFPPKPKD | | | | |
| | TLMISRTPEVTCVVVSVSHEDP | | | | |
| | EVKFNWYVDGVEVHNAKTKP | | | | |
| | REEQYNSTYRVVSVLTVLHQD | | | | |
| | WLNGKEYKCKVSNKALPAPIE | | | | |
| | KTISKAKGQPREPQVYVLPPSR | | | | |
| | EEMTKNQVSLLCLVKGFYPSDI | | | | |
| | AVEWESNGQPENNYLTWPPVL | | | | |
| | DSDGSFFLYSKLTVDKSRWQQ | | | | |
| | GNVFSCSVMHEALHNHYTQKS | | | | |
| | LSLSPG | | | | |
| PS3B1920 | SYELTQPPSVSVAPGQTARITCG | 1254 | NA | 1255 | PSMA_P72_ |
| | GNNIGSKSVHWYQQKPGQAPV | | | | F07 |
| | LVVYDDSDRPSGIPERFSGSNSG | | | | |
| | NTATLTISRVEAGDEADYYCQV | | | | |
| | WDSSTDHVVFGGGTKLTVLGG | | | | |
| | SEGKSSGSGSESKSTGGSEVQL | | | | |
| | VESGGGVVQPGRSLRLSCAASG | | | | |
| | FTFSSYGMNWVRQAPGKGLEW | | | | |
| | VAVTSYDGSNKYYADSVKGRF | | | | |
| | TISRDISKNTLYLQMSSLRAEDT | | | | |
| | AVYYCARDPYSSSWNGAFDIW | | | | |
| | GPGTMVTVSSEPKSSDKTHTCP | | | | |
| | PCPAPEAAGGPSVFLFPPKPKDT | | | | |
| | LMISRTPEVTCVVVSVSHEDPE | | | | |
| | VKFNWYVDGVEVHNAKTKPR | | | | |
| | EEQYNSTYRVVSVLTVLHQDW | | | | |
| | LNGKEYKCKVSNKALPAPIEKT | | | | |
| | ISKAKGQPREPQVYVLPPSREE | | | | |
| | MTKNQVSLLCLVKGFYPSDIAV | | | | |
| | EWESNGQPENNYLTWPPVLDS | | | | |
| | DGSFFLYSKLTVDKSRWQQGN | | | | |
| | VFSCSVMHEALHNHYTQKSLS | | | | |
| | LSPG | | | | |
| PS3B1921 | QSVLTQPPSASGTPGQGVTISCS | 1256 | NA | 1257 | PSMA_P72_ |
| | GSSSNIGSNTVNWFQQLPGTAP | | | | E07 |
| | KLLIYSDNQRPSGVPDRFSGSKS | | | | |
| | GTSASLAISGLQSEDEADYYCA | | | | |
| | AWDDSLNGYVFGTGTKVTVLG | | | | |
| | GSEGKSSGSGSESKSTGGSEVQ | | | | |
| | LVESGGGVVQPGRSLRLSCAAS | | | | |
| | GFTFITYGMHWVRQAPGKGLE | | | | |
| | WVAVVSFDESNKYYADSVKGR | | | | |
| | FTISRDNSKNTLYLQMNSLRAE | | | | |
| | DTAVYYCARALRDGNNWDYF | | | | |
| | NGMDVWGQGTTVTVSSEPKSS | | | | |
| | DKTHTCPPCPAPEAAGGPSVFL | | | | |
| | FPPKPKDTLMISRTPEVTCVVVS | | | | |
| | VSHEDPEVKFNWYVDGVEVHN | | | | |
| | AKTKPREEQYNSTYRVVSVLT | | | | |
| | VLHQDWLNGKEYKCKVSNKA | | | | |
| | LPAPIEKTISKAKGQPREPQVYV | | | | |
| | LPPSREEMTKNQVSLLCLVKGF | | | | |
| | YPSDIAVEWESNGQPENNYLT | | | | |
| | WPPVLDSDGSFFLYSKLTVDKS | | | | |
| | RWQQGNVFSCSVMHEALHNH | | | | |
| | YTQKSLSLSPG | | | | |
| PS3B1922 | QSVLTQPASVSGSPGQSITISCT | 1258 | NA | 1259 | PSMA_P72_ |
| | GTSSDVGGYNYVSWYQQHPG | | | | D01 |
| | KAPKLMIYEVSNRPSGVSNRFS | | | | |
| | GSKSGNTASLTISGLQAEDEAD | | | | |
| | YYCSSYTSSYTYVFGTGTKLTV | | | | |
| | LGGSEGKSSGSGSESKSTGGSE | | | | |
| | VQLVESGGDLVQPGGSLRLSCA | | | | |
| | ASGFTFNNYNMNWVRQAPGK | | | | |
| | GLEWVSHISTSSSNKYYADSVK | | | | |
| | GRFSISRDIAKNSMYLQMNSLR | | | | |
| | DEDTAVYYCARDGVGADYGD | | | | |
| | YYYYGMD VWGQGTTVTVSSE | | | | |
| | PKSSDKTHTCPPCPAPEAAGGP | | | | |
| | SVFLFPPKPKDTLMISRTPEVTC | | | | |
| | VVVSVSHEDPEVKFNWYVDGV | | | | |
| | EVHNAKTKPREEQYNSTYRVV | | | | |
| | SVLTVLHQDWLNGKEYKCKVS | | | | |
| | NKALPAPIEKTISKAKGQPREPQ | | | | |
| | VYVLPPSREEMTKNQVSLLCLV | | | | |
| | KGFYPSDIAVEWESNGQPENNY | | | | |
| | LTWPPVLDSDGSFFLYSKLTVD | | | | |
| | KSRWQQGNVFSCSVMHEALHN | | | | |
| | HYTQKSLSLSPG | | | | |
| PS3B1923 | QSVLTQPPSVSVAPGQTARITC | 1260 | NA | 1261 | PSMA_P72_ |
| | GGNNSGSKSVHWYQQKPGQAP | | | | C01 |
| | VLVVYDDSDRPSGIPERFSGSNS | | | | |
| | GNTATLTISRVEAGDEADYYCQ | | | | |
| | VWDSSSDHGVFGGGTKLTVLG | | | | |
| | GSEGKSSGSGSESKSTGGSQVQ | | | | |
| | LVESGGGEVQPGRSLRLSCAAS | | | | |
| | GFSFSGYGMHWVRQAPGKGLE | | | | |
| | WVAVMSYDGSNRFYVDSVRG | | | | |
| | RFSISRDNSKNTLYLQMNSLRP | | | | |
| | EDTAVYYCARDTVWGSHPDAF | | | | |
| | DIWGQGTVVTVSSEPKSSDKTH | | | | |
| | TCPPCPAPEAAGGPSVFLFPPKP | | | | |
| | KDTLMISRTPEVTCVVVSVSHE | | | | |
| | DPEVKFNWYVDGVEVHNAKT | | | | |
| | KPREEQYNSTYRVVSVLTVLH | | | | |
| | QDWLNGKEYKCKVSNKALPAP | | | | |
| | IEKTISKAKGQPREPQVYVLPPS | | | | |
| | REEMTKNQVSLLCLVKGFYPS | | | | |
| | DIAVEWESNGQPENNYLTWPP | | | | |
| | VLDSDGSFFLYSKLTVDKSRW | | | | |
| | QQGNVFSCSVMHEALHNHYTQ | | | | |
| | KSLSLSPG | | | | |
| PS3B1924 | SYELMQPPSVSVSPGQTARITCS | 1262 | NA | 1263 | PSMA_P72_ |
| | GDALPKQYAYWYQQKPGQAP | | | | A10 |
| | VLVIYKDSERPSGIPVRFSGSSS | | | | |
| | GTTVTLTITGVQAEDEADYYCQ | | | | |
| | SADSSGTYVFGTGTKVTVLGGS | | | | |
| | EGKSSGSGSESKSTGGSQVQLV | | | | |
| | ESGGGVVQPGRSLRLSCAASGF | | | | |
| | TFSSYNMNWVRQAPGKGLEW | | | | |
| | VAIIYYDGSNKYYADSVKGRFT | | | | |
| | ISRDISKNTLYLQMNSLRAEDT | | | | |
| | AVYYCARERGRDYYGMDVWG | | | | |
| | QGTTVTVSSEPKSSDKTHTCPP | | | | |
| | CPAPEAAGGPSVFLFPPKPKDT | | | | |
| | LMISRTPEVTCVVVSVSHEDPE | | | | |
| | VKFNWYVDGVEVHNAKTKPR | | | | |
| | EEQYNSTYRVVSVLTVLHQDW | | | | |
| | LNGKEYKCKVSNKALPAPIEKT | | | | |
| | ISKAKGQPREPQVYVLPPSREE | | | | |
| | MTKNQVSLLCLVKGFYPSDIAV | | | | |
| | EWESNGQPENNYLTWPPVLDS | | | | |
| | DGSFFLYSKLTVDKSRWQQGN | | | | |
| | VFSCSVMHEALHNHYTQKSLS | | | | |
| | LSPG | | | | |
| PS3B1925 | QSVLTQPPSASGTPGQRVTISCS | 1264 | NA | 1265 | PSMA_P70_ |
| | GSSSNIGSNTVNWYQQLPGTAP | | | | F02 |
| | KLLIYSSNQRPSGVPDRFSGSKS | | | | |
| | GTSASLAISGLQSEDEADYYCA | | | | |
| | AWDDSLNGVVFGGGTKLTVLG | | | | |
| | GSEGKSSGSGSESKSTGGSEVQ | | | | |
| | LLESGPGLVKPSETLSLTCTVSG | | | | |
| | GSIISYYWSWIRQPAGKGLEWI | | | | |
| | GRIYSSGSTNYNPSLKSRVTMS | | | | |
| | VDTSKNQFSLKLSSVTAADTAV | | | | |
| | YYCAKVGVWPGAFDIWGQGT | | | | |
| | MVTVSSEPKSSDKTHTCPPCPA | | | | |
| | PEAAGGPSVFLFPPKPKDTLMIS | | | | |
| | RTPEVTCVVVSVSHEDPEVKFN | | | | |
| | WYVDGVEVHNAKTKPREEQY | | | | |
| | NSTYRVVSVLTVLHQDWLNGK | | | | |
| | EYKCKVSNKALPAPIEKTISKA | | | | |
| | KGQPREPQVYVLPPSREEMTKN | | | | |
| | QVSLLCLVKGFYPSDIAVEWES | | | | |
| | NGQPENNYLTWPPVLDSDGSFF | | | | |
| | LYSKLTVDKSRWQQGNVFSCS | | | | |
| | VMHEALHNHYTQKSLSLSPG | | | | |
| PS3B1926 | EVQLVESGGGVVQPGRSLRLSC | 1266 | NA | 1267 | PSMA_P72_ |
| | AASGFSFSGYGMHWVRQAPGK | | | | G02 |
| | GLEWVAVISYDGSNKYYADSV | | | | |
| | KGRFTISRDNSKNTLYLQMNSL | | | | |
| | RVEDTAVYYCARDRIWGSRGY | | | | |
| | YYGMDVWGQGTTVTVSSGGS | | | | |
| | EGKSSGSGSESKSTGGSQSALT | | | | |
| | QPASVSGSPGQSITISCTGASSD | | | | |
| | VGGYNYVSWYQQHPGKAPKL | | | | |
| | MIYEVSNRPSGVSNRFSGSKSG | | | | |
| | NTASLTISGLQAEDEADYYCSS | | | | |
| | YTITSTLVFGGGTKLTVLEPKSS | | | | |
| | DKTHTCPPCPAPEAAGGPSVFL | | | | |
| | FPPKPKDTLMISRTPEVTCVVVS | | | | |
| | VSHEDPEVKFNWYVDGVEVHN | | | | |
| | AKTKPREEQYNSTYRVVSVLT | | | | |
| | VLHQDWLNGKEYKCKVSNKA | | | | |
| | LPAPIEKTISKAKGQPREPQVYV | | | | |
| | LPPSREEMTKNQVSLLCLVKGF | | | | |
| | YPSDIAVEWESNGQPENNYLT | | | | |
| | WPPVLDSDGSFFLYSKLTVDKS | | | | |
| | RWQQGNVFSCSVMHEALHNH | | | | |
| | YTQKSLSLSPG | | | | |
| PS3B1927 | QVQLVESGGGEVQPGRSLRLSC | 1268 | NA | 1269 | PSMA_P72_ |
| | AASGFSFSGYGMHWVRQAPGK | | | | C01 |
| | GLEWVAVMSYDGSNRFYVDS | | | | |
| | VRGRFSISRDNSKNTLYLQMNS | | | | |
| | LRPEDTAVYYCARDTVWGSHP | | | | |
| | DAFDIWGQGTVVTVSSGGSEG | | | | |
| | KSSGSGSESKSTGGSQSVLTQPP | | | | |
| | SVSVAPGQTARITCGGNNSGSK | | | | |
| | SVHWYQQKPGQAPVLVVYDD | | | | |
| | SDRPSGIPERFSGSNSGNTATLTI | | | | |
| | SRVEAGDEADYYCQVWDSSSD | | | | |
| | HGVFGGGTKLTVLEPKSSDKTH | | | | |
| | TCPPCPAPEAAGGPSVFLFPPKP | | | | |
| | KDTLMISRTPEVTCVVVSVSHE | | | | |
| | DPEVKFNWYVDGVEVHNAKT | | | | |
| | KPREEQYNSTYRVVSVLTVLH | | | | |
| | QDWLNGKEYKCKVSNKALPAP | | | | |
| | IEKTISKAKGQPREPQVYVLPPS | | | | |
| | REEMTKNQVSLLCLVKGFYPS | | | | |
| | DIAVEWESNGQPENNYLTWPP | | | | |
| | VLDSDGSFFLYSKLTVDKSRW | | | | |
| | QQGNVFSCSVMHEALHNHYTQ | | | | |
| | KSLSLSPG | | | | |
| PS3B1928 | QVQLQESGGDVVQPGRSLRLS | 1270 | NA | 1271 | PSMA_P72_ |
| | CAASGFSFSGYGLHWVRQAPG | | | | lA11 |
| | RGLEWVTLISYDGSNKYYADS | | | | |
| | VKGRFTISRDNSKNTLYLQMNS | | | | |
| | LRAEDTAVYYCAKTTVSDPYY | | | | |
| | YGMDVWGQGTTVTVSSGGSE | | | | |
| | GKSSGSGSESKSTGGSSYELTQP | | | | |
| | PSVSVAPGQTARITCGGNNIGS | | | | |
| | KSVHWYQQKPGQAPVLVVYD | | | | |
| | DSDRPSGIPERFSGTNSGNTATL | | | | |
| | TISRAEAGDEADYYCQVWDSS | | | | |
| | SDHVVFGGGTKLTVLEPKSSDK | | | | |
| | THTCPPCPAPEAAGGPSVFLFPP | | | | |
| | KPKDTLMISRTPEVTCVVVSVS | | | | |
| | HEDPEVKFNWYVDGVEVHNA | | | | |
| | KTKPREEQYNSTYRVVSVLTVL | | | | |
| | HQDWLNGKEYKCKVSNKALP | | | | |
| | APIEKTISKAKGQPREPQVYVLP | | | | |
| | PSREEMTKNQVSLLCLVKGFYP | | | | |
| | SDIAVEWESNGQPENNYLTWPP | | | | |
| | VLDSDGSFFLYSKLTVDKSRW | | | | |
| | QQGNVFSCSVMHEALHNHYTQ | | | | |
| | KSLSLSPG | | | | |
| PSMB1041 | QSVLTQPPSASGTPGQRVTISCS | 1272 | NA | 1273 | PSMA_P70_ |
| | GSSSNIGSNTVNWYQQLPGTAP | | | | F02 |
| | KLLIYSSNQRPSGVPDRFSGSKS | | | | |
| | GTSASLAISGLQSEDEADYYCA | | | | |
| | AWDDSLNGVVFGGGTKLTVLG | | | | |
| | GSEGKSSGSGSESKSTGGSEVQ | | | | |
| | LLESGPGLVKPSETLSLTCTVSG | | | | |
| | GSIISYYWSWIRQPAGKGLEWI | | | | |
| | GRIYSSGSTNYNPSLKSRVTMS | | | | |
| | VDTSKNQFSLKLSSVTAADTAV | | | | |
| | YYCAKVGVWPGAFDIWGQGT | | | | |
| | MVTVSSEPKSSDKTHTCPPCPA | | | | |
| | PEAAGGPSVFLFPPKPKDTLMIS | | | | |
| | RTPEVTCVVVSVSHEDPEVKFN | | | | |
| | WYVDGVEVHNAKTKPREEQY | | | | |
| | NSTYRVVSVLTVLHQDWLNGK | | | | |
| | EYKCKVSNKALPAPIEKTISKA | | | | |
| | KGQPREPQVYVLPPSREEMTKN | | | | |
| | QVSLLCLVKGFYPSDIAVEWES | | | | |
| | NGQPENNYLTWPPVLDSDGSFF | | | | |
| | LYSKLTVDKSRWQQGNVFSCS | | | | |
| | VMHEALHNHYTQKSLSLSPG | | | | |
| PSMB1045 | SYELMQPPSVSVSPGQTARITCS | 1274 | NA | 1275 | PSMA_P72_ |
| | GDALPKQYAYWYQQKPGQAP | | | | A10 |
| | VLVIYKDSERPSGIPVRFSGSSS | | | | |
| | GTTVTLTITGVQAEDEADYYCQ | | | | |
| | SADSSGTYVFGTGTKVTVLGGS | | | | |
| | EGKSSGSGSESKSTGGSQVQLV | | | | |
| | ESGGGVVQPGRSLRLSCAASGF | | | | |
| | TFSSYNMNWVRQAPGKGLEW | | | | |
| | VAIIYYDGSNKYYADSVKGRFT | | | | |
| | ISRDISKNTLYLQMNSLRAEDT | | | | |
| | AVYYCARERGRDYYGMDVWG | | | | |
| | QGTTVTVSSEPKSSDKTHTCPP | | | | |
| | CPAPEAAGGPSVFLFPPKPKDT | | | | |
| | LMISRTPEVTCVVVSVSHEDPE | | | | |
| | VKFNWYVDGVEVHNAKTKPR | | | | |
| | EEQYNSTYRVVSVLTVLHQDW | | | | |
| | LNGKEYKCKVSNKALPAPIEKT | | | | |
| | ISKAKGQPREPQVYVLPPSREE | | | | |
| | MTKNQVSLLCLVKGFYPSDIAV | | | | |
| | EWESNGQPENNYLTWPPVLDS | | | | |
| | DGSFFLYSKLTVDKSRWQQGN | | | | |
| | VFSCSVMHEALHNHYTQKSLS | | | | |
| | LSPG | | | | |
| PSMB1047 | QSVLTQPPSVSVAPGQTARITC | 1276 | NA | 1277 | PSMA_P72_ |
| | GGNNSGSKSVHWYQQKPGQAP | | | | C01 |
| | VLVVYDDSDRPSGIPERFSGSNS | | | | |
| | GNTATLTISRVEAGDEADYYCQ | | | | |
| | VWDSSSDHGVFGGGTKLTVLG | | | | |
| | GSEGKSSGSGSESKSTGGSQVQ | | | | |
| | LVESGGGEVQPGRSLRLSCAAS | | | | |
| | GFSFSGYGMHWVRQAPGKGLE | | | | |
| | WVAVMSYDGSNRFYVDSVRG | | | | |
| | RFSISRDNSKNTLYLQMNSLRP | | | | |
| | EDTAVYYCARDTVWGSHPDAF | | | | |
| | DIWGQGTVVTVSSEPKSSDKTH | | | | |
| | TCPPCPAPEAAGGPSVFLFPPKP | | | | |
| | KDTLMISRTPEVTCVVVSVSHE | | | | |
| | DPEVKFNWYVDGVEVHNAKT | | | | |
| | KPREEQYNSTYRVVSVLTVLH | | | | |
| | QDWLNGKEYKCKVSNKALPAP | | | | |
| | IEKTISKAKGQPREPQVYVLPPS | | | | |
| | REEMTKNQVSLLCLVKGFYPS | | | | |
| | DIAVEWESNGQPENNYLTWPP | | | | |
| | VLDSDGSFFLYSKLTVDKSRW | | | | |
| | QQGNVFSCSVMHEALHNHYTQ | | | | |
| | KSLSLSPG | | | | |
| PSMB1049 | QSVLTQPASVSGSPGQSITISCT | 1278 | NA | 1279 | PSMA_P72_ |
| | GTSSDVGGYNYVSWYQQHPG | | | | D01 |
| | KAPKLMIYEVSNRPSGVSNRFS | | | | |
| | GSKSGNTASLTISGLQAEDEAD | | | | |
| | YYCSSYTSSYTYVFGTGTKLTV | | | | |
| | LGGSEGKSSGSGSESKSTGGSE | | | | |
| | VQLVESGGDLVQPGGSLRLSCA | | | | |
| | ASGFTFNNYNMNWVRQAPGK | | | | |
| | GLEWVSHISTSSSNKYYADSVK | | | | |
| | GRFSISRDIAKNSMYLQMNSLR | | | | |
| | DEDTAVYYCARDGVGADYGD | | | | |
| | YYYYGMDVWGQGTTVTVSSE | | | | |
| | PKSSDKTHTCPPCPAPEAAGGP | | | | |
| | SVFLFPPKPKDTLMISRTPEVTC | | | | |
| | VVVSVSHEDPEVKFNWYVDGV | | | | |
| | EVHNAKTKPREEQYNSTYRVV | | | | |
| | SVLTVLHQDWLNGKEYKCKVS | | | | |
| | NKALPAPIEKTISKAKGQPREPQ | | | | |
| | VYVLPPSREEMTKNQVSLLCLV | | | | |
| | KGFYPSDIAVEWESNGQPENNY | | | | |
| | LTWPPVLDSDGSFFLYSKLTVD | | | | |
| | KSRWQQGNVFSCSVMHEALHN | | | | |
| | HYTQKSLSLSPG | | | | |
| PSMB1051 | QSVLTQPPSASGTPGQGVTISCS | 1280 | NA | 1281 | PSMA_P72_ |
| | GSSSNIGSNTVNWFQQLPGTAP | | | | E07 |
| | KLLIYSDNQRPSGVPDRFSGSKS | | | | |
| | GTSASLAISGLQSEDEADYYCA | | | | |
| | AWDDSLNGYVFGTGTKVTVLG | | | | |
| | GSEGKSSGSGSESKSTGGSEVQ | | | | |
| | LVESGGGVVQPGRSLRLSCAAS | | | | |
| | GFTFITYGMHWVRQAPGKGLE | | | | |
| | WVAVVSFDESNKYYADSVKGR | | | | |
| | FTISRDNSKNTLYLQMNSLRAE | | | | |
| | DTAVYYCARALRDGNNWDYF | | | | |
| | NGMDVWGQGTTVTVSSEPKSS | | | | |
| | DKTHTCPPCPAPEAAGGPSVFL | | | | |
| | FPPKPKDTLMISRTPEVTCVVVS | | | | |
| | VSHEDPEVKFNWYVDGVEVHN | | | | |
| | AKTKPREEQYNSTYRVVSVLT | | | | |
| | VLHQDWLNGKEYKCKVSNKA | | | | |
| | LPAPIEKTISKAKGQPREPQVYV | | | | |
| | LPPSREEMTKNQVSLLCLVKGF | | | | |
| | YPSDIAVEWESNGQPENNYLT | | | | |
| | WPPVLDSDGSFFLYSKLTVDKS | | | | |
| | RWQQGNVFSCSVMHEALHNH | | | | |
| | YTQKSLSLSPG | | | | |
| PSMB1052 | SYELTQPPSVSVAPGQTARITCG | 1282 | NA | 1283 | PSMA_P72_ |
| | GNNIGSKSVHWYQQKPGQAPV | | | | F07 |
| | LVVYDDSDRPSGIPERFSGSNSG | | | | |
| | NTATLTISRVEAGDEADYYCQV | | | | |
| | WDSSTDHVVFGGGTKLTVLGG | | | | |
| | SEGKSSGSGSESKSTGGSEVQL | | | | |
| | VESGGGVVQPGRSLRLSCAASG | | | | |
| | FTFSSYGMNWVRQAPGKGLEW | | | | |
| | VAVTSYDGSNKYYADSVKGRF | | | | |
| | TISRDISKNTLYLQMSSLRAEDT | | | | |
| | AVYYCARDPYSSSWNGAFDIW | | | | |
| | GPGTMVTVSSEPKSSDKTHTCP | | | | |
| | PCPAPEAAGGPSVFLFPPKPKDT | | | | |
| | LMISRTPEVTCVVVSVSHEDPE | | | | |
| | VKFNWYVDGVEVHNAKTKPR | | | | |
| | EEQYNSTYRVVSVLTVLHQDW | | | | |
| | LNGKEYKCKVSNKALPAPIEKT | | | | |
| | ISKAKGQPREPQVYVLPPSREE | | | | |
| | MTKNQVSLLCLVKGFYPSDIAV | | | | |
| | EWESNGQPENNYLTWPPVLDS | | | | |
| | DGSFFLYSKLTVDKSRWQQGN | | | | |
| | VFSCSVMHEALHNHYTQKSLS | | | | |
| | LSPG | | | | |
| PSMB1060 | EIVLTQSPGTLSVSPGERATLSC | 1284 | NA | 1285 | PSMA_P75_ |
| | RASQSVRSNLAWYQQKPGQAP | | | | F01 |
| | RLLIYGASTRATGIPARFSGSGS | | | | |
| | GTEFTLTISSLQSEDFAVYYCHQ | | | | |
| | YNDWPPYTFGQGTKLEIKGGSE | | | | |
| | GKSSGSGSESKSTGGSQVQLQE | | | | |
| | SGGGVVQPGRSLRLSCAASGFT | | | | |
| | FSTYGMHWVRQAPGKGLEWV | | | | |
| | AFISYDGSNKYYADSVKGRFTI | | | | |
| | SRDNSKHTLYLQMNSLRAEDT | | | | |
| | AVYYCAGRDNLRFLEWFMDV | | | | |
| | WGQGTTVTVSSEPKSSDKTHTC | | | | |
| | PPCPAPEAAGGPSVFLFPPKPKD | | | | |
| | TLMISRTPEVTCVVVSVSHEDP | | | | |
| | EVKFNWYVDGVEVHNAKTKP | | | | |
| | REEQYNSTYRVVSVLTVLHQD | | | | |
| | WLNGKEYKCKVSNKALPAPIE | | | | |
| | KTISKAKGQPREPQVYVLPPSR | | | | |
| | EEMTKNQVSLLCLVKGFYPSDI | | | | |
| | AVEWESNGQPENNYLTWPPVL | | | | |
| | DSDGSFFLYSKLTVDKSRWQQ | | | | |
| | GNVFSCSVMHEALHNHYTQKS | | | | |
| | LSLSPG | | | | |
| PSMB1068 | QVQLQESGGDVVQPGRSLRLS | 1286 | NA | 1287 | PSMA_P72_ |
| | CAASGFSFSGYGLHWVRQAPG | | | | A11 |
| | RGLEWVTLISYDGSNKYYADS | | | | |
| | VKGRFTISRDNSKNTLYLQMNS | | | | |
| | LRAEDTAVYYCAKTTVSDPYY | | | | |
| | YGMDVWGQGTTVTVSSGGSE | | | | |
| | GKSSGSGSESKSTGGSSYELTQP | | | | |
| | PSVSVAPGQTARITCGGNNIGS | | | | |
| | KSVHWYQQKPGQAPVLVVYD | | | | |
| | DSDRPSGIPERFSGTNSGNTATL | | | | |
| | TISRAEAGDEADYYCQVWDSS | | | | |
| | SDHVVFGGGTKLTVLEPKSSDK | | | | |
| | THTCPPCPAPEAAGGPSVFLFPP | | | | |
| | KPKDTLMISRTPEVTCVVVSVS | | | | |
| | HEDPEVKFNWYVDGVEVHNA | | | | |
| | KTKPREEQYNSTYRVVSVLTVL | | | | |
| | HQDWLNGKEYKCKVSNKALP | | | | |
| | APIEKTISKAKGQPREPQVYVLP | | | | |
| | PSREEMTKNQVSLLCLVKGFYP | | | | |
| | SDIAVEWESNGQPENNYLTWPP | | | | |
| | VLDSDGSFFLYSKLTVDKSRW | | | | |
| | QQGNVFSCSVMHEALHNHYTQ | | | | |
| | KSLSLSPG | | | | |
| PSMB1069 | QVQLVESGGGEVQPGRSLRLSC | 1288 | NA | 1289 | PSMA_P72_ |
| | AASGFSFSGYGMHWVRQAPGK | | | | C01 |
| | GLEWVAVMSYDGSNRFYVDS | | | | |
| | VRGRFSISRDNSKNTLYLQMNS | | | | |
| | LRPEDTAVYYCARDTVWGSHP | | | | |
| | DAFDIWGQGTVVTVSSGGSEG | | | | |
| | KSSGSGSESKSTGGSQSVLTQPP | | | | |
| | SVSVAPGQTARITCGGNNSGSK | | | | |
| | SVHWYQQKPGQAPVLVVYDD | | | | |
| | SDRPSGIPERFSGSNSGNTATLTI | | | | |
| | SRVEAGDEADYYCQVWDSSSD | | | | |
| | HGVFGGGTKLTVLEPKSSDKTH | | | | |
| | TCPPCPAPEAAGGPSVFLFPPKP | | | | |
| | KDTLMISRTPEVTCVVVSVSHE | | | | |
| | DPEVKFNWYVDGVEVHNAKT | | | | |
| | KPREEQYNSTYRVVSVLTVLH | | | | |
| | QDWLNGKEYKCKVSNKALPAP | | | | |
| | IEKTISKAKGQPREPQVYVLPPS | | | | |
| | REEMTKNQVSLLCLVKGFYPS | | | | |
| | DIAVEWESNGQPENNYLTWPP | | | | |
| | VLDSDGSFFLYSKLTVDKSRW | | | | |
| | QQGNVFSCSVMHEALHNHYTQ | | | | |
| | KSLSLSPG | | | | |
| PSMB1075 | EVQLVESGGGVVQPGRSLRLSC | 1290 | NA | 1291 | PSMA_P72_ |
| | AASGFSFSGYGMHWVRQAPGK | | | | G02 |
| | GLEWVAVISYDGSNKYYADSV | | | | |
| | KGRFTISRDNSKNTLYLQMNSL | | | | |
| | RVEDTAVYYCARDRIWGSRGY | | | | |
| | YYGMDVWGQGTTVTVSSGGS | | | | |
| | EGKSSGSGSESKSTGGSQSALT | | | | |
| | QPASVSGSPGQSITISCTGASSD | | | | |
| | VGGYNYVSWYQQHPGKAPKL | | | | |
| | MIYEVSNRPSGVSNRFSGSKSG | | | | |
| | NTASLTISGLQAEDEADYYCSS | | | | |
| | YTITSTLVFGGGTKLTVLEPKSS | | | | |
| | DKTHTCPPCPAPEAAGGPSVFL | | | | |
| | FPPKPKDTLMISRTPEVTCVVVS | | | | |
| | VSHEDPEVKFNWYVDGVEVHN | | | | |
| | AKTKPREEQYNSTYRVVSVLT | | | | |
| | VLHQDWLNGKEYKCKVSNKA | | | | |
| | LPAPIEKTISKAKGQPREPQVYV | | | | |
| | LPPSREEMTKNQVSLLCLVKGF | | | | |
| | YPSDIAVEWESNGQPENNYLT | | | | |
| | WPPVLDSDGSFFLYSKLTVDKS | | | | |
| | RWQQGNVFSCSVMHEALHNH | | | | |
| | YTQKSLSLSPG | | | | |
| PSMB290 | QSVLTQPASVSGSPGQSITISCT | 1292 | NA | 1293 | PSMA_P72_ |
| 8 | GTSSDVGGYNYVSWYQQHPG | | | | D01-HC- |
| | KAPKLMIYEVSNRPSGVSNRFS | | | | D95E |
| | GSKSGNTASLTISGLQAEDEAD | | | | |
| | YYCSSYTSSYTYVFGTGTKLTV | | | | |
| | LGGSEGKSSGSGSESKSTGGSE | | | | |
| | VQLVESGGDLVQPGGSLRLSCA | | | | |
| | ASGFTFNNYNMNWVRQAPGK | | | | |
| | GLEWVSHISTSSSNKYYADSVK | | | | |
| | GRFSISRDIAKNSMYLQMNSLR | | | | |
| | DEDTAVYYCAREGVGADYGD | | | | |
| | YYYYGMDVWGQGTTVTVSSE | | | | |
| | PKSSDKTHTCPPCPAPEAAGGP | | | | |
| | SVFLFPPKPKDTLMISRTPEVTC | | | | |
| | VVVSVSHEDPEVKFNWYVDGV | | | | |
| | EVHNAKTKPREEQYNSTYRVV | | | | |
| | SVLTVLHQDWLNGKEYKCKVS | | | | |
| | NKALPAPIEKTISKAKGQPREPQ | | | | |
| | VYVLPPSREEMTKNQVSLLCLV | | | | |
| | KGFYPSDIAVEWESNGQPENNY | | | | |
| | LTWPPVLDSDGSFFLYSKLTVD | | | | |
| | KSRWQQGNVFSCSVMHEALHN | | | | |
| | HYTQKSLSLSPG | | | | |
| PSMB290 | SYELMQPPSVSVSPGQTARITCS | 1294 | NA | 1295 | PSMA_P72_ |
| 9 | GDALPKQYAYWYQQKPGQAP | | | | A10-HC- |
| | VLVIYKDSERPSGIPVRFSGSSS | | | | G54E |
| | GTTVTLTITGVQAEDEADYYCQ | | | | |
| | SADSSGTYVFGTGTKVTVLGGS | | | | |
| | EGKSSGSGSESKSTGGSQVQLV | | | | |
| | ESGGGVVQPGRSLRLSCAASGF | | | | |
| | TFSSYNMNWVRQAPGKGLEW | | | | |
| | VAIIYYDESNKYYADSVKGRFT | | | | |
| | ISRDISKNTLYLQMNSLRAEDT | | | | |
| | AVYYCARERGRDYYGMDVWG | | | | |
| | QGTTVTVSSEPKSSDKTHTCPP | | | | |
| | CPAPEAAGGPSVFLFPPKPKDT | | | | |
| | LMISRTPEVTCVVVSVSHEDPE | | | | |
| | VKFNWYVDGVEVHNAKTKPR | | | | |
| | EEQYNSTYRVVSVLTVLHQDW | | | | |
| | LNGKEYKCKVSNKALPAPIEKT | | | | |
| | ISKAKGQPREPQVYVLPPSREE | | | | |
| | MTKNQVSLLCLVKGFYPSDIAV | | | | |
| | EWESNGQPENNYLTWPPVLDS | | | | |
| | DGSFFLYSKLTVDKSRWQQGN | | | | |
| | VFSCSVMHEALHNHYTQKSLS | | | | |
| | LSPG | | | | |
| PS3B1391 | EVQLVESGGGLVKPGGSLRLSC | 1459 | EIVMTQSPGTLS | 1460 | PSMHB49S |
| | VASGFTFSFYSMNWVRQAPGK | | LSPGERATLSCR | | C1133_011 |
| | GLDWVSSISSSGNYIYYADSVK | | ASQSVSSSFLAW | | A11_1 |
| | GRFTISRDNAKNSLHLHMNSLK | | YQQKPGQAPRL | | |
| | AEDTAMYFCARSYSGSYDAFD | | LISGASSRATGIP | | |
| | FWGQGTMVTVSSASTKGPSVF | | DRFSVSGSGTDF | | |
| | PLAPSSKSTSGGTAALGCLVKD | | TLTISRLEPEDFA | | |
| | YFPEPVTVSWNSGALTSGVHTF | | VYYCQQYGVSP | | |
| | PAVLQSSGLYSLSSVVTVPSSSL | | WTFGQGTKVEIK | | |
| | GTQTYICNVNHKPSNTKVDKK | | RTVAAPSVFIFPP | | |
| | VEPKSCDKTHTCPPCPAPEAAG | | SDEQLKSGTASV | | |
| | GPSVFLFPPKPKDTLMISRTPEV | | VCLLNNFYPREA | | |
| | TCVVVSVSHEDPEVKFNWYVD | | KVQWKVDNAL | | |
| | GVEVHNAKTKPREEQYNSTYR | | QSGNSQESVTEQ | | |
| | VVSVLTVLHQDWLNGKEYKC | | DSKDSTYSLSST | | |
| | KVSNKALPAPIEKTISKAKGQP | | LTLSKADYEKH | | |
| | REPQVYTLPPSREEMTKNQVSL | | KVYACEVTHQG | | |
| | SCAVKGFYPSDIAVEWESNGQP | | LSSPVTKSFNRG | | |
| | ENNYKTTPPVLDSDGSFFLVSK | | EC | | |
| | LTVDKSRWQQGNVFSCSVMHE | | | | |
| | ALHNRFTQKSLSLSPGK | | | | |
| PS3B1396 | EVQLVESGGGLVQPGGSLRLSC | 1461 | QSVLTQPPSVSA | 1462 | PSMB896- |
| | AASGFTFSSYAMSWVRQAPGK | | APGQKVTISCSG | | G100A |
| | GLEWVSAISGGIGSTYYADSVK | | SSSNIGINYVSW | | |
| | GRFTISRDNSKNTLWLQMNSLR | | YQQLPGTAPKLL | | |
| | AEDTAVYYCAKDAVGATPYYF | | IYDNNKRPSGIP | | |
| | DYWGQGTLVTVSSASTKGPSV | | DRFSGSKSGTSA | | |
| | FPLAPSSKSTSGGTAALGCLVK | | TLGITGLQTGDE | | |
| | DYFPEPVTVSWNSGALTSGVHT | | ADYYCGTWDSS | | |
| | FPAVLQSSGLYSLSSVVTVPSSS | | LSAVVFGGGTKL | | |
| | LGTQTYICNVNHKPSNTKVDK | | TVLGQPKAAPSV | | |
| | KVEPKSCDKTHTCPPCPAPEAA | | TLFPPSSEELQAN | | |
| | GGPSVFLFPPKPKDTLMISRTPE | | KATLVCLISDFY | | |
| | VTCVVVSVSHEDPEVKFNWYV | | PGAVTVAWKAD | | |
| | DGVEVHNAKTKPREEQYNSTY | | SSPVKAGVETTT | | |
| | RVVSVLTVLHQDWLNGKEYKC | | PSKQSNNKYAAS | | |
| | KVSNKALPAPIEKTISKAKGQP | | SYLSLTPEQWKS | | |
| | REPQVYTLPPSREEMTKNQVSL | | HRSYSCQVTHEG | | |
| | SCAVKGFYPSDIAVEWESNGQP | | STVEKTVAPTEC | | |
| | ENNYKTTPPVLDSDGSFFLVSK | | S | | |
| | LTVDKSRWQQGNVFSCSVMHE | | | | |
| | ALHNRFTQKSLSLSPGK | | | | |

TABLE 61
PSMA × CD3 Bispecific Antibodies: Clone Descriptions

| Name | Bispecific Description |
|---|---|
| PS3B917 | FAB-A: CD3B891 (CD3B376 − K477); FAB-B: PSMB889 |
| PS3B918 | FAB-A: CD3B891 (CD3B376 − K477); FAB-B: PSMB890 |
| PS3B913 | FAB-A: CD3B891 (CD3B376 − K477); FAB-B: PSMB891 |
| PS3B915 | FAB-A: CD3B891 (CD3B376 − K477); FAB-B: PSMB892 |
| PS3B914 | FAB-A: CD3B891 (CD3B376 − K477); FAB-B: PSMB893 |
| PS3B916 | FAB-A: CD3B891 (CD3B376 − K477); FAB-B: PSMB894 |
| PS3B919 | FAB-A: CD3B891 (CD3B376 − K477); FAB-B: PSMB895 |
| PS3B921 | FAB-A: CD3B891 (CD3B376 − K477); FAB-B: PSMB896 |
| PS3B920 | FAB-A: CD3B891 (CD3B376 − K477); FAB-B: PSMB897 |
| PS3B922 | FAB-A: CD3B891 (CD3B376 − K477); FAB-B: PSMB898 |
| PS3B912 | FAB-A: CD3B891 (CD3B376 − K477); FAB-B: PSMB899 |
| PS3B930 | FAB-A: CD3B2183 (CD3W245); FAB-B: PSMB889 |
| PS3B931 | FAB-A: CD3B2183 (CD3W245); FAB-B: PSMB890 |
| PS3B926 | FAB-A: CD3B2183 (CD3W245); FAB-B: PSMB891 |
| PS3B928 | FAB-A: CD3B2183 (CD3W245); FAB-B: PSMB892 |
| PS3B927 | FAB-A: CD3B2183 (CD3W245); FAB-B: PSMB893 |
| PS3B929 | FAB-A: CD3B2183 (CD3W245); FAB-B: PSMB894 |
| PS3B932 | FAB-A: CD3B2183 (CD3W245); FAB-B: PSMB895 |
| PS3B934 | FAB-A: CD3B2183 (CD3W245); FAB-B: PSMB896 |
| PS3B933 | FAB-A: CD3B2183 (CD3W245); FAB-B: PSMB897 |
| PS3B935 | FAB-A: CD3B2183 (CD3W245); FAB-B: PSMB898 |
| PS3B925 | FAB-A: CD3B2183 (CD3W245); FAB-B: PSMB899 |
| PS3B1352 | FAB-A: CD3B2197 (CD3B376 + K477); FAB-B: PSMB946 |
| | CD3B2197 is CD3B376 but with C-term K |
| | PSMB946 is PSMB895 but with C-term K |
| PS3B1353 | FAB-A: CD3B2197 (CD3B376 + K477); FAB-B: PSMB947 |
| | CD3B2197 is CD3B376 but with C-term K |
| | PSMB947 is PSMB896 but with C-term K |
| PS3B1354 | FAB-A: CD3B2197 (CD3B376 + K477); FAB-B: PSMB948 |
| | CD3B2197 is CD3B376 but with C-term K |
| | PSMB948 is PSMB897 but with C-term K |
| PS3B1355 | FAB-A: CD3B2197 (CD3B376 + K477); FAB-B: PSMB949 |
| | CD3B2197 is CD3B376 with C-term K |
| | PSMB949 is PSMB898 but with C-term K |
| PS3B1356 | FAB-A: CD3B2200 (CD3B450 + K477); FAB-B: PSMB946 |
| | CD3B2200 is CD3B450 with the C-term K |
| | PSMB946 is PSMB895 but with C-term K |
| PS3B1357 | FAB-A: CD3B2200 (CD3B450 + K477); FAB-B: PSMB947 |
| | CD3B2200 is CD3B450 with the C-term K |
| | PSMB947 is PSMB896 but with C-term K |
| PS3B1358 | FAB-A: CD3B2200 (CD3B450 + K477); FAB-B: PSMB949 |
| | CD3B2200 is CD3B450 with the C-term K |
| | PSMB949 is PSMB898 but with C-term K |
| PSMB937 | FAB-A: CD3B2186 (CD3B450 − K477); FAB-B: PSMB897 |
| | (PSMB948) CD3B2186 is CD3B450 without the C-term K |
| | PSMB948 is PSMB897 but with C-term K |

TABLE 62
PSMA × CD3 Bispecific Antibodies: CD3 Arm Descriptions

| | | SEQ | | SEQ | |
|---|---|---|---|---|---|
| | | ID | | ID | CD3 Arm |
| Name | HC1 | NO. | LC1 | NO. | Description |
| PS3 | QVQLQQSGPRLVRPSQTLSLTCAI | 1296 | QSALTQPASVS | 1297 | with CD3B376 |
| B917 | SGDSVFNNNAAWSWIRQSPSRGL | | GSPGQSITISCT | | arm (CD3B891 |
| | EWLGRTYYRSKWLYDYAVSVKS | | GTSSNIGTYKFV | | without K477 or |
| | RITVNPDTSRNQFTLQLNSVTPED | | SWYQQHPDKA | | CD3B2197 with |
| | TALYYCARGYSSSFDYWGQGTL | | PKVLLYEVSKR | | K477 in HC1) |
| | VTVSSASTKGPSVFPLAPSSKSTS | | PSGVSSRFSGSK | | HC1 Construct |
| | GGTAALGCLVKDYFPEPVTVSW | | SGNTASLTISGL | | ID: |
| | NSGALTSGVHTFPAVLQSSGLYS | | QAEDQADYHC | | PBD000100300 |
| | LSSVVTVPSSSLGTQTYICNVNHK | | VSYAGSGTLLF | | LC1 Contruct |
| | PSNTKVDKKVEPKSCDKTHTCPP | | GGGTKLTVLGQ | | ID: |
| | CPAPEAAGGPSVFLFPPKPKDTL | | PKAAPSVTLFPP | | PBD000044707 |
| | MISRTPEVTCVVVSVSHEDPEVK | | SSEELQANKAT | | |
| | FNWYVDGVEVHNAKTKPREEQY | | LVCLISDFYPGA | | |
| | NSTYRVVSVLTVLHQDWLNGKE | | VTVAWKADSSP | | |
| | YKCKVSNKALPAPIEKTISKAKG | | VKAGVETTTPS | | |
| | QPREPQVYTLPPSREEMTKNQVS | | KQSNNKYAASS | | |
| | LTCLVKGFYPSDIAVEWESNGQP | | YLSLTPEQWKS | | |
| | ENNYKTTPPVLDSDGSFLLYSKL | | HRSYSCQVTHE | | |
| | TVDKSRWQQGNVFSCSVMHEAL | | GSTVEKTVAPT | | |
| | HNHYTQKSLSLSPG | | ECS | | |
| PS3 | QVQLQQSGPRLVRPSQTLSLTCAI | 1298 | QSALTQPASVS | 1299 | with CD3B376 |
| B918 | SGDSVFNNNAAWSWIRQSPSRGL | | GSPGQSITISCT | | arm (CD3B891 |
| | EWLGRTYYRSKWLYDYAVSVKS | | GTSSNIGTYKFV | | without K477 or |
| | RITVNPDTSRNQFTLQLNSVTPED | | SWYQQHPDKA | | CD3B2197 with |
| | TALYYCARGYSSSFDYWGQGTL | | PKVLLYEVSKR | | K477 in HC1) |
| | VTVSSASTKGPSVFPLAPSSKSTS | | PSGVSSRFSGSK | | HC1 Construct |
| | GGTAALGCLVKDYFPEPVTVSW | | SGNTASLTISGL | | ID: |
| | NSGALTSGVHTFPAVLQSSGLYS | | QAEDQADYHC | | PBD000100300 |
| | LSSVVTVPSSSLGTQTYICNVNHK | | VSYAGSGTLLF | | LC1 Contruct |
| | PSNTKVDKKVEPKSCDKTHTCPP | | GGGTKLTVLGQ | | ID: |
| | CPAPEAAGGPSVFLFPPKPKDTL | | PKAAPSVTLFPP | | PBD000044707 |
| | MISRTPEVTCVVVSVSHEDPEVK | | SSEELQANKAT | | |
| | FNWYVDGVEVHNAKTKPREEQY | | LVCLISDFYPGA | | |
| | NSTYRVVSVLTVLHQDWLNGKE | | VTVAWKADSSP | | |
| | YKCKVSNKALPAPIEKTISKAKG | | VKAGVETTTPS | | |
| | QPREPQVYTLPPSREEMTKNQVS | | KQSNNKYAASS | | |
| | LTCLVKGFYPSDIAVEWESNGQP | | YLSLTPEQWKS | | |
| | ENNYKTTPPVLDSDGSFLLYSKL | | HRSYSCQVTHE | | |
| | TVDKSRWQQGNVFSCSVMHEAL | | GSTVEKTVAPT | | |
| | HNHYTQKSLSLSPG | | ECS | | |
| PS3 | QVQLQQSGPRLVRPSQTLSLTCAI | 1300 | QSALTQPASVS | 1301 | with CD3B376 |
| B913 | SGDSVFNNNAAWSWIRQSPSRGL | | GSPGQSITISCT | | arm (CD3B891 |
| | EWLGRTYYRSKWLYDYAVSVKS | | GTSSNIGTYKFV | | without K477 or |
| | RITVNPDTSRNQFTLQLNSVTPED | | SWYQQHPDKA | | CD3B2197 with |
| | TALYYCARGYSSSFDYWGQGTL | | PKVLLYEVSKR | | K477 in HC1) |
| | VTVSSASTKGPSVFPLAPSSKSTS | | PSGVSSRFSGSK | | HC1 Construct |
| | GGTAALGCLVKDYFPEPVTVSW | | SGNTASLTISGL | | ID: |
| | NSGALTSGVHTFPAVLQSSGLYS | | QAEDQADYHC | | PBD000100300 |
| | LSSVVTVPSSSLGTQTYICNVNHK | | VSYAGSGTLLF | | LC1 Contruct |
| | PSNTKVDKKVEPKSCDKTHTCPP | | GGGTKLTVLGQ | | ID: |
| | CPAPEAAGGPSVFLFPPKPKDTL | | PKAAPSVTLFPP | | PBD000044707 |
| | MISRTPEVTCVVVSVSHEDPEVK | | SSEELQANKAT | | |
| | FNWYVDGVEVHNAKTKPREEQY | | LVCLISDFYPGA | | |
| | NSTYRVVSVLTVLHQDWLNGKE | | VTVAWKADSSP | | |
| | YKCKVSNKALPAPIEKTISKAKG | | VKAGVETTTPS | | |
| | QPREPQVYTLPPSREEMTKNQVS | | KQSNNKYAASS | | |
| | LTCLVKGFYPSDIAVEWESNGQP | | YLSLTPEQWKS | | |
| | ENNYKTTPPVLDSDGSFLLYSKL | | HRSYSCQVTHE | | |
| | TVDKSRWQQGNVFSCSVMHEAL | | GSTVEKTVAPT | | |
| | HNHYTQKSLSLSPG | | ECS | | |
| PS3 | QVQLQQSGPRLVRPSQTLSLTCAI | 1302 | QSALTQPASVS | 1303 | with CD3B376 |
| B915 | SGDSVFNNNAAWSWIRQSPSRGL | | GSPGQSITISCT | | arm (CD3B891 |
| | EWLGRTYYRSKWLYDYAVSVKS | | GTSSNIGTYKFV | | without K477 or |
| | RITVNPDTSRNQFTLQLNSVTPED | | SWYQQHPDKA | | CD3B2197 with |
| | TALYYCARGYSSSFDYWGQGTL | | PKVLLYEVSKR | | K477 in HC1) |
| | VTVSSASTKGPSVFPLAPSSKSTS | | PSGVSSRFSGSK | | HC1 Construct |
| | GGTAALGCLVKDYFPEPVTVSW | | SGNTASLTISGL | | ID: |
| | NSGALTSGVHTFPAVLQSSGLYS | | QAEDQADYHC | | PBD000100300 |
| | LSSVVTVPSSSLGTQTYICNVNHK | | VSYAGSGTLLF | | LC1 Contruct |
| | PSNTKVDKKVEPKSCDKTHTCPP | | GGGTKLTVLGQ | | ID: |
| | CPAPEAAGGPSVFLFPPKPKDTL | | PKAAPSVTLFPP | | PBD000044707 |
| | MISRTPEVTCVVVSVSHEDPEVK | | SSEELQANKAT | | |
| | FNWYVDGVEVHNAKTKPREEQY | | LVCLISDFYPGA | | |
| | NSTYRVVSVLTVLHQDWLNGKE | | VTVAWKADSSP | | |
| | YKCKVSNKALPAPIEKTISKAKG | | VKAGVETTTPS | | |
| | QPREPQVYTLPPSREEMTKNQVS | | KQSNNKYAASS | | |
| | LTCLVKGFYPSDIAVEWESNGQP | | YLSLTPEQWKS | | |
| | ENNYKTTPPVLDSDGSFLLYSKL | | HRSYSCQVTHE | | |
| | TVDKSRWQQGNVFSCSVMHEAL | | GSTVEKTVAPT | | |
| | HNHYTQKSLSLSPG | | ECS | | |
| PS3 | QVQLQQSGPRLVRPSQTLSLTCAI | 1304 | QSALTQPASVS | 1305 | with CD3B376 |
| B914 | SGDSVFNNNAAWSWIRQSPSRGL | | GSPGQSITISCT | | arm (CD3B891 |
| | EWLGRTYYRSKWLYDYAVSVKS | | GTSSNIGTYKFV | | without K477 or |
| | RITVNPDTSRNQFTLQLNSVTPED | | SWYQQHPDKA | | CD3B2197 with |
| | TALYYCARGYSSSFDYWGQGTL | | PKVLLYEVSKR | | K477 in HC1) |
| | VTVSSASTKGPSVFPLAPSSKSTS | | PSGVSSRFSGSK | | HC1 Construct |
| | GGTAALGCLVKDYFPEPVTVSW | | SGNTASLTISGL | | ID: |
| | NSGALTSGVHTFPAVLQSSGLYS | | QAEDQADYHC | | PBD000100300 |
| | LSSVVTVPSSSLGTQTYICNVNHK | | VSYAGSGTLLF | | LC1 Contruct |
| | PSNTKVDKKVEPKSCDKTHTCPP | | GGGTKLTVLGQ | | ID: |
| | CPAPEAAGGPSVFLFPPKPKDTL | | PKAAPSVTLFPP | | PBD000044707 |
| | MISRTPEVTCVVVSVSHEDPEVK | | SSEELQANKAT | | |
| | FNWYVDGVEVHNAKTKPREEQY | | LVCLISDFYPGA | | |
| | NSTYRVVSVLTVLHQDWLNGKE | | VTVAWKADSSP | | |
| | YKCKVSNKALPAPIEKTISKAKG | | VKAGVETTTPS | | |
| | QPREPQVYTLPPSREEMTKNQVS | | KQSNNKYAASS | | |
| | LTCLVKGFYPSDIAVEWESNGQP | | YLSLTPEQWKS | | |
| | ENNYKTTPPVLDSDGSFLLYSKL | | HRSYSCQVTHE | | |
| | TVDKSRWQQGNVFSCSVMHEAL | | GSTVEKTVAPT | | |
| | HNHYTQKSLSLSPG | | ECS | | |
| PS3 | QVQLQQSGPRLVRPSQTLSLTCAI | 1306 | QSALTQPASVS | 1307 | with CD3B376 |
| B916 | SGDSVFNNNAAWSWIRQSPSRGL | | GSPGQSITISCT | | arm (CD3B891 |
| | EWLGRTYYRSKWLYDYAVSVKS | | GTSSNIGTYKFV | | without K477 or |
| | RITVNPDTSRNQFTLQLNSVTPED | | SWYQQHPDKA | | CD3B2197 with |
| | TALYYCARGYSSSFDYWGQGTL | | PKVLLYEVSKR | | K477 in HC1) |
| | VTVSSASTKGPSVFPLAPSSKSTS | | PSGVSSRFSGSK | | HC1 Construct |
| | GGTAALGCLVKDYFPEPVTVSW | | SGNTASLTISGL | | ID: |
| | NSGALTSGVHTFPAVLQSSGLYS | | QAEDQADYHC | | PBD000100300 |
| | LSSVVTVPSSSLGTQTYICNVNHK | | VSYAGSGTLLF | | LC1 Contruct |
| | PSNTKVDKKVEPKSCDKTHTCPP | | GGGTKLTVLGQ | | ID: |
| | CPAPEAAGGPSVFLFPPKPKDTL | | PKAAPSVTLFPP | | PBD000044707 |
| | MISRTPEVTCVVVSVSHEDPEVK | | SSEELQANKAT | | |
| | FNWYVDGVEVHNAKTKPREEQY | | LVCLISDFYPGA | | |
| | NSTYRVVSVLTVLHQDWLNGKE | | VTVAWKADSSP | | |
| | YKCKVSNKALPAPIEKTISKAKG | | VKAGVETTTPS | | |
| | QPREPQVYTLPPSREEMTKNQVS | | KQSNNKYAASS | | |
| | LTCLVKGFYPSDIAVEWESNGQP | | YLSLTPEQWKS | | |
| | ENNYKTTPPVLDSDGSFLLYSKL | | HRSYSCQVTHE | | |
| | TVDKSRWQQGNVFSCSVMHEAL | | GSTVEKTVAPT | | |
| | HNHYTQKSLSLSPG | | ECS | | |
| PS3 | QVQLQQSGPRLVRPSQTLSLTCAI | 1308 | QSALTQPASVS | 1309 | with CD3B376 |
| B919 | SGDSVFNNNAAWSWIRQSPSRGL | | GSPGQSITISCT | | arm (CD3B891 |
| | EWLGRTYYRSKWLYDYAVSVKS | | GTSSNIGTYKFV | | without K477 or |
| | RITVNPDTSRNQFTLQLNSVTPED | | SWYQQHPDKA | | CD3B2197 with |
| | TALYYCARGYSSSFDYWGQGTL | | PKVLLYEVSKR | | K477 in HC1) |
| | VTVSSASTKGPSVFPLAPSSKSTS | | PSGVSSRFSGSK | | HC1 Construct |
| | GGTAALGCLVKDYFPEPVTVSW | | SGNTASLTISGL | | ID: |
| | NSGALTSGVHTFPAVLQSSGLYS | | QAEDQADYHC | | PBD000100300 |
| | LSSWTVPSSSLGTQTYICNVNHK | | VSYAGSGTLLF | | LC1 Contruct |
| | PSNTKVDKKVEPKSCDKTHTCPP | | GGGTKLTVLGQ | | ID: |
| | CPAPEAAGGPSVFLFPPKPKDTL | | PKAAPSVTLFPP | | PBD000044707 |
| | MISRTPEVTCVVVSVSHEDPEVK | | SSEELQANKAT | | |
| | FNWYVDGVEVHNAKTKPREEQY | | LVCLISDFYPGA | | |
| | NSTYRVVSVLTVLHQDWLNGKE | | VTVAWKADSSP | | |
| | YKCKVSNKALPAPIEKTISKAKG | | VKAGVETTTPS | | |
| | QPREPQVYTLPPSREEMTKNQVS | | KQSNNKYAASS | | |
| | LTCLVKGFYPSDIAVEWESNGQP | | YLSLTPEQWKS | | |
| | ENNYKTTPPVLDSDGSFLLYSKL | | HRSYSCQVTHE | | |
| | TVDKSRWQQGNVFSCSVMHEAL | | GSTVEKTVAPT | | |
| | HNHYTQKSLSLSPG | | ECS | | |
| PS3 | QVQLQQSGPRLVRPSQTLSLTCAI | 1310 | QSALTQPASVS | 1311 | with CD3B376 |
| B921 | SGDSVFNNNAAWSWIRQSPSRGL | | GSPGQSITISCT | | arm (CD3B891 |
| | EWLGRTYYRSKWLYDYAVSVKS | | GTSSNIGTYKFV | | without K477 or |
| | RITVNPDTSRNQFTLQLNSVTPED | | SWYQQHPDKA | | CD3B2197 with |
| | TALYYCARGYSSSFDYWGQGTL | | PKVLLYEVSKR | | K477 in HC1) |
| | VTVSSASTKGPSVFPLAPSSKSTS | | PSGVSSRFSGSK | | HC1 Construct |
| | GGTAALGCLVKDYFPEPVTVSW | | SGNTASLTISGL | | ID: |
| | NSGALTSGVHTFPAVLQSSGLYS | | QAEDQADYHC | | PBD000100300 |
| | LSSWTVPSSSLGTQTYICNVNHK | | VSYAGSGTLLF | | LC1 Contruct |
| | PSNTKVDKKVEPKSCDKTHTCPP | | GGGTKLTVLGQ | | ID: |
| | CPAPEAAGGPSVFLFPPKPKDTL | | PKAAPSVTLFPP | | PBD000044707 |
| | MISRTPEVTCVVVSVSHEDPEVK | | SSEELQANKAT | | |
| | FNWYVDGVEVHNAKTKPREEQY | | LVCLISDFYPGA | | |
| | NSTYRVVSVLTVLHQDWLNGKE | | VTVAWKADSSP | | |
| | YKCKVSNKALPAPIEKTISKAKG | | VKAGVETTTPS | | |
| | QPREPQVYTLPPSREEMTKNQVS | | KQSNNKYAASS | | |
| | LTCLVKGFYPSDIAVEWESNGQP | | YLSLTPEQWKS | | |
| | ENNYKTTPPVLDSDGSFLLYSKL | | HRSYSCQVTHE | | |
| | TVDKSRWQQGNVFSCSVMHEAL | | GSTVEKTVAPT | | |
| | HNHYTQKSLSLSPG | | ECS | | |
| PS3 | QVQLQQSGPRLVRPSQTLSLTCAI | 1312 | QSALTQPASVS | 1313 | with CD3B376 |
| B920 | SGDSVFNNNAAWSWIRQSPSRGL | | GSPGQSITISCT | | arm (CD3B891 |
| | EWLGRTYYRSKWLYDYAVSVKS | | GTSSNIGTYKFV | | without K477 or |
| | RITVNPDTSRNQFTLQLNSVTPED | | SWYQQHPDKA | | CD3B2197 with |
| | TALYYCARGYSSSFDYWGQGTL | | PKVLLYEVSKR | | K477 in HC1) |
| | VTVSSASTKGPSVFPLAPSSKSTS | | PSGVSSRFSGSK | | HC1 Construct |
| | GGTAALGCLVKDYFPEPVTVSW | | SGNTASLTISGL | | ID: |
| | NSGALTSGVHTFPAVLQSSGLYS | | QAEDQADYHC | | PBD000100300 |
| | LSSVVTVPSSSLGTQTYICNVNHK | | VSYAGSGTLLF | | LC1 Contruct |
| | PSNTKVDKKVEPKSCDKTHTCPP | | GGGTKLTVLGQ | | ID: |
| | CPAPEAAGGPSVFLFPPKPKDTL | | PKAAPSVTLFPP | | PBD000044707 |
| | MISRTPEVTCVVVSVSHEDPEVK | | SSEELQANKAT | | |
| | FNWYVDGVEVHNAKTKPREEQY | | LVCLISDFYPGA | | |
| | NSTYRVVSVLTVLHQDWLNGKE | | VTVAWKADSSP | | |
| | YKCKVSNKALPAPIEKTISKAKG | | VKAGVETTTPS | | |
| | QPREPQVYTLPPSREEMTKNQVS | | KQSNNKYAASS | | |
| | LTCLVKGFYPSDIAVEWESNGQP | | YLSLTPEQWKS | | |
| | ENNYKTTPPVLDSDGSFLLYSKL | | HRSYSCQVTHE | | |
| | TVDKSRWQQGNVFSCSVMHEAL | | GSTVEKTVAPT | | |
| | HNHYTQKSLSLSPG | | ECS | | |
| PS3 | QVQLQQSGPRLVRPSQTLSLTCAI | 1314 | QSALTQPASVS | 1315 | with CD3B376 |
| B922 | SGDSVFNNNAAWSWIRQSPSRGL | | GSPGQSITISCT | | arm (CD3B891 |
| | EWLGRTYYRSKWLYDYAVSVKS | | GTSSNIGTYKFV | | without K477 or |
| | RITVNPDTSRNQFTLQLNSVTPED | | SWYQQHPDKA | | CD3B2197 with |
| | TALYYCARGYSSSFDYWGQGTL | | PKVLLYEVSKR | | K477 in HC1) |
| | VTVSSASTKGPSVFPLAPSSKSTS | | PSGVSSRFSGSK | | HC1 Construct |
| | GGTAALGCLVKDYFPEPVTVSW | | SGNTASLTISGL | | ID: |
| | NSGALTSGVHTFPAVLQSSGLYS | | QAEDQADYHC | | PBD000100300 |
| | LSSWTVPSSSLGTQTYICNVNHK | | VSYAGSGTLLF | | LC1 Contruct |
| | PSNTKVDKKVEPKSCDKTHTCPP | | GGGTKLTVLGQ | | ID: |
| | CPAPEAAGGPSVFLFPPKPKDTL | | PKAAPSVTLFPP | | PBD000044707 |
| | MISRTPEVTCVVVSVSHEDPEVK | | SSEELQANKAT | | |
| | FNWYVDGVEVHNAKTKPREEQY | | LVCLISDFYPGA | | |
| | NSTYRVVSVLTVLHQDWLNGKE | | VTVAWKADSSP | | |
| | YKCKVSNKALPAPIEKTISKAKG | | VKAGVETTTPS | | |
| | QPREPQVYTLPPSREEMTKNQVS | | KQSNNKYAASS | | |
| | LTCLVKGFYPSDIAVEWESNGQP | | YLSLTPEQWKS | | |
| | ENNYKTTPPVLDSDGSFLLYSKL | | HRSYSCQVTHE | | |
| | TVDKSRWQQGNVFSCSVMHEAL | | GSTVEKTVAPT | | |
| | HNHYTQKSLSLSPG | | ECS | | |
| PS3 | QVQLQQSGPRLVRPSQTLSLTCAI | 1316 | QSALTQPASVS | 1317 | with CD3B376 |
| B912 | SGDSVFNNNAAWSWIRQSPSRGL | | GSPGQSITISCT | | arm (CD3B891 |
| | EWLGRTYYRSKWLYDYAVSVKS | | GTSSNIGTYKFV | | without K477 or |
| | RITVNPDTSRNQFTLQLNSVTPED | | SWYQQHPDKA | | CD3B2197 with |
| | TALYYCARGYSSSFDYWGQGTL | | PKVLLYEVSKR | | K477 in HC1) |
| | VTVSSASTKGPSVFPLAPSSKSTS | | PSGVSSRFSGSK | | HC1 Construct |
| | GGTAALGCLVKDYFPEPVTVSW | | SGNTASLTISGL | | ID: |
| | NSGALTSGVHTFPAVLQSSGLYS | | QAEDQADYHC | | PBD000100300 |
| | LSSWTVPSSSLGTQTYICNVNHK | | VSYAGSGTLLF | | LC1 Contruct |
| | PSNTKVDKKVEPKSCDKTHTCPP | | GGGTKLTVLGQ | | ID: |
| | CPAPEAAGGPSVFLFPPKPKDTL | | PKAAPSVTLFPP | | PBD000044707 |
| | MISRTPEVTCVVVSVSHEDPEVK | | SSEELQANKAT | | |
| | FNWYVDGVEVHNAKTKPREEQY | | LVCLISDFYPGA | | |
| | NSTYRVVSVLTVLHQDWLNGKE | | VTVAWKADSSP | | |
| | YKCKVSNKALPAPIEKTISKAKG | | VKAGVETTTPS | | |
| | QPREPQWTLPPSREEMTKNQVS | | KQSNNKYAASS | | |
| | LTCLVKGFYPSDIAVEWESNGQP | | YLSLTPEQWKS | | |
| | ENNYKTTPPVLDSDGSFLLYSKL | | HRSYSCQVTHE | | |
| | TVDKSRWQQGNVFSCSVMHEAL | | GSTVEKTVAPT | | |
| | HNHYTQKSLSLSPG | | ECS | | |
| PS3 | EVQLVESGGGLVKPGGSLRLSCA | 1318 | DIQMTQSPSSLS | 1319 | with CD3W245 |
| B930 | ASGFTFSRYNMNWVRQAPGKGL | | ASVGDRVTITC | | arm (CD3B2183 |
| | EWVSSISTSSNYIYYADSVKGRFT | | RARQSIGTAIH | | without K477) |
| | FSRDNAKNSLDLQMSGLRAEDT | | WYQQKPGKAP | | HC1 Construct |
| | AIYYCTRGWGPFDYWGQGTLVT | | KLLIKYASESIS | | ID: |
| | VSSASTKGPSVFPLAPSSKSTSGG | | GVPSRFSGSGS | | PBD000100302 |
| | TAALGCLVKDYFPEPVTVSWNS | | GTDFTLTISSLQ | | LC1 Contruct |
| | GALTSGVHTFPAVLQSSGLYSLSS | | PEDFATYYCQQ | | ID: |
| | VVTVPSSSLGTQTYICNVNHKPS | | SGSWPYTFGQG | | PBD000084982 |
| | NTKVDKKVEPKSCDKTHTCPPCP | | TKLEIKRTVAA | | |
| | APEAAGGPSVFLFPPKPKDTLMIS | | PSVFIFPPSDEQ | | |
| | RTPEVTCVVVSVSHEDPEVKFNW | | LKSGTASVVCL | | |
| | YVDGVEVHNAKTKPREEQYNST | | LNNFYPREAKV | | |
| | YRVVSVLTVLHQDWLNGKEYKC | | QWKVDNALQS | | |
| | KVSNKALPAPIEKTISKAKGQPRE | | GNSQESVTEQD | | |
| | PQVYTLPPSREEMTKNQVSLTCL | | SKDSTYSLSSTL | | |
| | VKGFYPSDIAVEWESNGQPENNY | | TLSKADYEKHK | | |
| | KTTPPVLDSDGSFLLYSKLTVDK | | VYACEVTHQGL | | |
| | SRWQQGNVFSCSVMHEALHNHY | | SSPVTKSFNRGE | | |
| | TQKSLSLSP | | C | | |
| PS3 | EVQLVESGGGLVKPGGSLRLSCA | 1320 | DIQMTQSPSSLS | 1321 | with CD3W245 |
| B931 | ASGFTFSRYNMNWVRQAPGKGL | | ASVGDRVTITC | | arm (CD3B2183 |
| | EWVSSISTSSNYIYYADSVKGRFT | | RARQSIGTAIH | | without K477) |
| | FSRDNAKNSLDLQMSGLRAEDT | | WYQQKPGKAP | | HC1 Construct |
| | AIYYCTRGWGPFDYWGQGTLVT | | KLLIKYASESIS | | ID: |
| | VSSASTKGPSVFPLAPSSKSTSGG | | GVPSRFSGSGS | | PBD000100302 |
| | TAALGCLVKDYFPEPVTVSWNS | | GTDFTLTISSLQ | | LC1 Contruct |
| | GALTSGVHTFPAVLQSSGLYSLSS | | PEDFATYYCQQ | | ID: |
| | VVTVPSSSLGTQTYICNVNHKPS | | SGSWPYTFGQG | | PBD000084982 |
| | NTKVDKKVEPKSCDKTHTCPPCP | | TKLEIKRTVAA | | |
| | APEAAGGPSVFLFPPKPKDTLMIS | | PSVFIFPPSDEQ | | |
| | RTPEVTCVVVSVSHEDPEVKFNW | | LKSGTASVVCL | | |
| | YVDGVEVHNAKTKPREEQYNST | | LNNFYPREAKV | | |
| | YRVVSVLTVLHQDWLNGKEYKC | | QWKVDNALQS | | |
| | KVSNKALPAPIEKTISKAKGQPRE | | GNSQESVTEQD | | |
| | PQVYTLPPSREEMTKNQVSLTCL | | SKDSTYSLSSTL | | |
| | VKGFYPSDIAVEWESNGQPENNY | | TLSKADYEKHK | | |
| | KTTPPVLDSDGSFLLYSKLTVDK | | VYACEVTHQGL | | |
| | SRWQQGNVFSCSVMHEALHNHY | | SSPVTKSFNRGE | | |
| | TQKSLSLSP | | C | | |
| PS3 | EVQLVESGGGLVKPGGSLRLSCA | 1322 | DIQMTQSPSSLS | 1323 | with CD3W245 |
| B926 | ASGFTFSRYNMNWVRQAPGKGL | | ASVGDRVTITC | | arm (CD3B2183 |
| | EWVSSISTSSNYIYYADSVKGRFT | | RARQSIGTAIH | | without K477) |
| | FSRDNAKNSLDLQMSGLRAEDT | | WYQQKPGKAP | | HC1 Construct |
| | AIYYCTRGWGPFDYWGQGTLVT | | KLLIKYASESIS | | ID: |
| | VSSASTKGPSVFPLAPSSKSTSGG | | GVPSRFSGSGS | | PBD000100302 |
| | TAALGCLVKDYFPEPVTVSWNS | | GTDFTLTISSLQ | | LC1 Contruct |
| | GALTSGVHTFPAVLQSSGLYSLSS | | PEDFATYYCQQ | | ID: |
| | VVTVPSSSLGTQTYICNVNHKPS | | SGSWPYTFGQG | | PBD000084982 |
| | NTKVDKKVEPKSCDKTHTCPPCP | | TKLEIKRTVAA | | |
| | APEAAGGPSVFLFPPKPKDTLMIS | | PSVFIFPPSDEQ | | |
| | RTPEVTCVVVSVSHEDPEVKFNW | | LKSGTASVVCL | | |
| | YVDGVEVHNAKTKPREEQYNST | | LNNFYPREAKV | | |
| | YRVVSVLTVLHQDWLNGKEYKC | | QWKVDNALQS | | |
| | KVSNKALPAPIEKTISKAKGQPRE | | GNSQESVTEQD | | |
| | PQVYTLPPSREEMTKNQVSLTCL | | SKDSTYSLSSTL | | |
| | VKGFYPSDIAVEWESNGQPENNY | | TLSKADYEKHK | | |
| | KTTPPVLDSDGSFLLYSKLTVDK | | VYACEVTHQGL | | |
| | SRWQQGNVFSCSVMHEALHNHY | | SSPVTKSFNRGE | | |
| | TQKSLSLSP | | C | | |
| PS3 | EVQLVESGGGLVKPGGSLRLSCA | 1324 | DIQMTQSPSSLS | 1325 | with CD3W245 |
| B928 | ASGFTFSRYNMNWVRQAPGKGL | | ASVGDRVTITC | | arm (CD3B2183 |
| | EWVSSISTSSNYIYYADSVKGRFT | | RARQSIGTAIH | | without K477) |
| | FSRDNAKNSLDLQMSGLRAEDT | | WYQQKPGKAP | | HC1 Construct |
| | AIYYCTRGWGPFDYWGQGTLVT | | KLLIKYASESIS | | ID: |
| | VSSASTKGPSVFPLAPSSKSTSGG | | GVPSRFSGSGS | | PBD000100302 |
| | TAALGCLVKDYFPEPVTVSWNS | | GTDFTLTISSLQ | | LC1 Contruct |
| | GALTSGVHTFPAVLQSSGLYSLSS | | PEDFATYYCQQ | | ID: |
| | VVTVPSSSLGTQTYICNVNHKPS | | SGSWPYTFGQG | | PBD000084982 |
| | NTKVDKKVEPKSCDKTHTCPPCP | | TKLEIKRTVAA | | |
| | APEAAGGPSVFLFPPKPKDTLMIS | | PSVFIFPPSDEQ | | |
| | RTPEVTCVVVSVSHEDPEVKFNW | | LKSGTASVVCL | | |
| | YVDGVEVHNAKTKPREEQYNST | | LNNFYPREAKV | | |
| | YRVVSVLTVLHQDWLNGKEYKC | | QWKVDNALQS | | |
| | KVSNKALPAPIEKTISKAKGQPRE | | GNSQESVTEQD | | |
| | PQVYTLPPSREEMTKNQVSLTCL | | SKDSTYSLSSTL | | |
| | VKGFYPSDIAVEWESNGQPENNY | | TLSKADYEKHK | | |
| | KTTPPVLDSDGSFLLYSKLTVDK | | VYACEVTHQGL | | |
| | SRWQQGNVFSCSVMHEALHNHY | | SSPVTKSFNRGE | | |
| | TQKSLSLSP | | C | | |
| PS3 | EVQLVESGGGLVKPGGSLRLSCA | 1326 | DIQMTQSPSSLS | 1327 | with CD3W245 |
| B927 | ASGFTFSRYNMNWVRQAPGKGL | | ASVGDRVTITC | | arm (CD3B2183 |
| | EWVSSISTSSNYIYYADSVKGRFT | | RARQSIGTAIH | | without K477) |
| | FSRDNAKNSLDLQMSGLRAEDT | | WYQQKPGKAP | | HC1 Construct |
| | AIYYCTRGWGPFDYWGQGTLVT | | KLLIKYASESIS | | ID: |
| | VSSASTKGPSVFPLAPSSKSTSGG | | GVPSRFSGSGS | | PBD000100302 |
| | TAALGCLVKDYFPEPVTVSWNS | | GTDFTLTISSLQ | | LC1 Contruct |
| | GALTSGVHTFPAVLQSSGLYSLSS | | PEDFATYYCQQ | | ID: |
| | VVTVPSSSLGTQTYICNVNHKPS | | SGSWPYTFGQG | | PBD000084982 |
| | NTKVDKKVEPKSCDKTHTCPPCP | | TKLEIKRTVAA | | |
| | APEAAGGPSVFLFPPKPKDTLMIS | | PSVFIFPPSDEQ | | |
| | RTPEVTCVVVSVSHEDPEVKFNW | | LKSGTASVVCL | | |
| | YVDGVEVHNAKTKPREEQYNST | | LNNFYPREAKV | | |
| | YRVVSVLTVLHQDWLNGKEYKC | | QWKVDNALQS | | |
| | KVSNKALPAPIEKTISKAKGQPRE | | GNSQESVTEQD | | |
| | PQVYTLPPSREEMTKNQVSLTCL | | SKDSTYSLSSTL | | |
| | VKGFYPSDIAVEWESNGQPENNY | | TLSKADYEKHK | | |
| | KTTPPVLDSDGSFLLYSKLTVDK | | VYACEVTHQGL | | |
| | SRWQQGNVFSCSVMHEALHNHY | | SSPVTKSFNRGE | | |
| | TQKSLSLSP | | C | | |
| PS3 | EVQLVESGGGLVKPGGSLRLSCA | 1328 | DIQMTQSPSSLS | 1329 | with CD3W245 |
| B929 | ASGFTFSRYNMNWVRQAPGKGL | | ASVGDRVTITC | | arm (CD3B2183 |
| | EWVSSISTSSNYIYYADSVKGRFT | | RARQSIGTAIH | | without K477) |
| | FSRDNAKNSLDLQMSGLRAEDT | | WYQQKPGKAP | | HC1 Construct |
| | AIYYCTRGWGPFDYWGQGTLVT | | KLLIKYASESIS | | ID: |
| | VSSASTKGPSVFPLAPSSKSTSGG | | GVPSRFSGSGS | | PBD000100302 |
| | TAALGCLVKDYFPEPVTVSWNS | | GTDFTLTISSLQ | | LC1 Contruct |
| | GALTSGVHTFPAVLQSSGLYSLSS | | PEDFATYYCQQ | | ID: |
| | VVTVPSSSLGTQTYICNVNHKPS | | SGSWPYTFGQG | | PBD000084982 |
| | NTKVDKKVEPKSCDKTHTCPPCP | | TKLEIKRTVAA | | |
| | APEAAGGPSVFLFPPKPKDTLMIS | | PSVFIFPPSDEQ | | |
| | RTPEVTCVVVSVSHEDPEVKFNW | | LKSGTASVVCL | | |
| | YVDGVEVHNAKTKPREEQYNST | | LNNFYPREAKV | | |
| | YRVVSVLTVLHQDWLNGKEYKC | | QWKVDNALQS | | |
| | KVSNKALPAPIEKTISKAKGQPRE | | GNSQESVTEQD | | |
| | PQVYTLPPSREEMTKNQVSLTCL | | SKDSTYSLSSTL | | |
| | VKGFYPSDIAVEWESNGQPENNY | | TLSKADYEKHK | | |
| | KTTPPVLDSDGSFLLYSKLTVDK | | VYACEVTHQGL | | |
| | SRWQQGNVFSCSVMHEALHNHY | | SSPVTKSFNRGE | | |
| | TQKSLSLSP | | C | | |
| PS3 | EVQLVESGGGLVKPGGSLRLSCA | 1330 | DIQMTQSPSSLS | 1331 | with CD3W245 |
| B932 | ASGFTFSRYNMNWVRQAPGKGL | | ASVGDRVTITC | | arm (CD3B2183 |
| | EWVSSISTSSNYIYYADSVKGRFT | | RARQSIGTAIH | | without K477) |
| | FSRDNAKNSLDLQMSGLRAEDT | | WYQQKPGKAP | | HC1 Construct |
| | AIYYCTRGWGPFDYWGQGTLVT | | KLLIKYASESIS | | ID: |
| | VSSASTKGPSVFPLAPSSKSTSGG | | GVPSRFSGSGS | | PBD000100302 |
| | TAALGCLVKDYFPEPVTVSWNS | | GTDFTLTISSLQ | | LC1 Contruct |
| | GALTSGVHTFPAVLQSSGLYSLSS | | PEDFATYYCQQ | | ID: |
| | VVTVPSSSLGTQTYICNVNHKPS | | SGSWPYTFGQG | | PBD000084982 |
| | NTKVDKKVEPKSCDKTHTCPPCP | | TKLEIKRTVAA | | |
| | APEAAGGPSVFLFPPKPKDTLMIS | | PSVFIFPPSDEQ | | |
| | RTPEVTCVVVSVSHEDPEVKFNW | | LKSGTASVVCL | | |
| | YVDGVEVHNAKTKPREEQYNST | | LNNFYPREAKV | | |
| | YRVVSVLTVLHQDWLNGKEYKC | | QWKVDNALQS | | |
| | KVSNKALPAPIEKTISKAKGQPRE | | GNSQESVTEQD | | |
| | PQVYTLPPSREEMTKNQVSLTCL | | SKDSTYSLSSTL | | |
| | VKGFYPSDIAVEWESNGQPENNY | | TLSKADYEKHK | | |
| | KTTPPVLDSDGSFLLYSKLTVDK | | VYACEVTHQGL | | |
| | SRWQQGNVFSCSVMHEALHNHY | | SSPVTKSFNRGE | | |
| | TQKSLSLSP | | C | | |
| PS3 | EVQLVESGGGLVKPGGSLRLSCA | 1332 | DIQMTQSPSSLS | 1333 | with CD3W245 |
| B934 | ASGFTFSRYNMNWVRQAPGKGL | | ASVGDRVTITC | | arm (CD3B2183 |
| | EWVSSISTSSNYIYYADSVKGRFT | | RARQSIGTAIH | | without K477) |
| | FSRDNAKNSLDLQMSGLRAEDT | | WYQQKPGKAP | | HC1 Construct |
| | AIYYCTRGWGPFDYWGQGTLVT | | KLLIKYASESIS | | ID: |
| | VSSASTKGPSVFPLAPSSKSTSGG | | GVPSRFSGSGS | | PBD000100302 |
| | TAALGCLVKDYFPEPVTVSWNS | | GTDFTLTISSLQ | | LC1 Contruct |
| | GALTSGVHTFPAVLQSSGLYSLSS | | PEDFATYYCQQ | | ID: |
| | VVTVPSSSLGTQTYICNVNHKPS | | SGSWPYTFGQG | | PBD000084982 |
| | NTKVDKKVEPKSCDKTHTCPPCP | | TKLEIKRTVAA | | |
| | APEAAGGPSVFLFPPKPKDTLMIS | | PSVFIFPPSDEQ | | |
| | RTPEVTCVVVSVSHEDPEVKFNW | | LKSGTASVVCL | | |
| | YVDGVEVHNAKTKPREEQYNST | | LNNFYPREAKV | | |
| | YRVVSVLTVLHQDWLNGKEYKC | | QWKVDNALQS | | |
| | KVSNKALPAPIEKTISKAKGQPRE | | GNSQESVTEQD | | |
| | PQVYTLPPSREEMTKNQVSLTCL | | SKDSTYSLSSTL | | |
| | VKGFYPSDIAVEWESNGQPENNY | | TLSKADYEKHK | | |
| | KTTPPVLDSDGSFLLYSKLTVDK | | VYACEVTHQGL | | |
| | SRWQQGNVFSCSVMHEALHNHY | | SSPVTKSFNRGE | | |
| | TQKSLSLSP | | C | | |
| PS3 | EVQLVESGGGLVKPGGSLRLSCA | 1334 | DIQMTQSPSSLS | 1335 | with CD3W245 |
| B933 | ASGFTFSRYNMNWVRQAPGKGL | | ASVGDRVTITC | | arm (CD3B2183 |
| | EWVSSISTSSNYIYYADSVKGRFT | | RARQSIGTAIH | | without K477) |
| | FSRDNAKNSLDLQMSGLRAEDT | | WYQQKPGKAP | | HC1 Construct |
| | AIYYCTRGWGPFDYWGQGTLVT | | KLLIKYASESIS | | ID: |
| | VSSASTKGPSVFPLAPSSKSTSGG | | GVPSRFSGSGS | | PBD000100302 |
| | TAALGCLVKDYFPEPVTVSWNS | | GTDFTLTISSLQ | | LC1 Contruct |
| | GALTSGVHTFPAVLQSSGLYSLSS | | PEDFATYYCQQ | | ID: |
| | VVTVPSSSLGTQTYICNVNHKPS | | SGSWPYTFGQG | | PBD000084982 |
| | NTKVDKKVEPKSCDKTHTCPPCP | | TKLEIKRTVAA | | |
| | APEAAGGPSVFLFPPKPKDTLMIS | | PSVFIFPPSDEQ | | |
| | RTPEVTCVVVSVSHEDPEVKFNW | | LKSGTASVVCL | | |
| | YVDGVEVHNAKTKPREEQYNST | | LNNFYPREAKV | | |
| | YRVVSVLTVLHQDWLNGKEYKC | | QWKVDNALQS | | |
| | KVSNKALPAPIEKTISKAKGQPRE | | GNSQESVTEQD | | |
| | PQVYTLPPSREEMTKNQVSLTCL | | SKDSTYSLSSTL | | |
| | VKGFYPSDIAVEWESNGQPENNY | | TLSKADYEKHK | | |
| | KTTPPVLDSDGSFLLYSKLTVDK | | VYACEVTHQGL | | |
| | SRWQQGNVFSCSVMHEALHNHY | | SSPVTKSFNRGE | | |
| | TQKSLSLSP | | C | | |
| PS3 | EVQLVESGGGLVKPGGSLRLSCA | 1336 | DIQMTQSPSSLS | 1337 | with CD3W245 |
| B935 | ASGFTFSRYNMNWVRQAPGKGL | | ASVGDRVTITC | | arm (CD3B2183 |
| | EWVSSISTSSNYIYYADSVKGRFT | | RARQSIGTAIH | | without K477) |
| | FSRDNAKNSLDLQMSGLRAEDT | | WYQQKPGKAP | | HC1 Construct |
| | AIYYCTRGWGPFDYWGQGTLVT | | KLLIKYASESIS | | ID: |
| | VSSASTKGPSVFPLAPSSKSTSGG | | GVPSRFSGSGS | | PBD000100302 |
| | TAALGCLVKDYFPEPVTVSWNS | | GTDFTLTISSLQ | | LC1 Contruct |
| | GALTSGVHTFPAVLQSSGLYSLSS | | PEDFATYYCQQ | | ID: |
| | VVTVPSSSLGTQTYICNVNHKPS | | SGSWPYTFGQG | | PBD000084982 |
| | NTKVDKKVEPKSCDKTHTCPPCP | | TKLEIKRTVAA | | |
| | APEAAGGPSVFLFPPKPKDTLMIS | | PSVFIFPPSDEQ | | |
| | RTPEVTCVVVSVSHEDPEVKFNW | | LKSGTASVVCL | | |
| | YVDGVEVHNAKTKPREEQYNST | | LNNFYPREAKV | | |
| | YRVVSVLTVLHQDWLNGKEYKC | | QWKVDNALQS | | |
| | KVSNKALPAPIEKTISKAKGQPRE | | GNSQESVTEQD | | |
| | PQVYTLPPSREEMTKNQVSLTCL | | SKDSTYSLSSTL | | |
| | VKGFYPSDIAVEWESNGQPENNY | | TLSKADYEKHK | | |
| | KTTPPVLDSDGSFLLYSKLTVDK | | VYACEVTHQGL | | |
| | SRWQQGNVFSCSVMHEALHNHY | | SSPVTKSFNRGE | | |
| | TQKSLSLSP | | C | | |
| PS3 | EVQLVESGGGLVKPGGSLRLSCA | 1338 | DIQMTQSPSSLS | 1339 | with CD3W245 |
| B925 | ASGFTFSRYNMNWVRQAPGKGL | | ASVGDRVTITC | | arm (CD3B2183 |
| | EWVSSISTSSNYIYYADSVKGRFT | | RARQSIGTAIH | | without K477) |
| | FSRDNAKNSLDLQMSGLRAEDT | | WYQQKPGKAP | | HC1 Construct |
| | AIYYCTRGWGPFDYWGQGTLVT | | KLLIKYASESIS | | ID: |
| | VSSASTKGPSVFPLAPSSKSTSGG | | GVPSRFSGSGS | | PBD000100302 |
| | TAALGCLVKDYFPEPVTVSWNS | | GTDFTLTISSLQ | | LC1 Contruct |
| | GALTSGVHTFPAVLQSSGLYSLSS | | PEDFATYYCQQ | | ID: |
| | VVTVPSSSLGTQTYICNVNHKPS | | SGSWPYTFGQG | | PBD000084982 |
| | NTKVDKKVEPKSCDKTHTCPPCP | | TKLEIKRTVAA | | |
| | APEAAGGPSVFLFPPKPKDTLMIS | | PSVFIFPPSDEQ | | |
| | RTPEVTCVVVSVSHEDPEVKFNW | | LKSGTASVVCL | | |
| | YVDGVEVHNAKTKPREEQYNST | | LNNFYPREAKV | | |
| | YRVVSVLTVLHQDWLNGKEYKC | | QWKVDNALQS | | |
| | KVSNKALPAPIEKTISKAKGQPRE | | GNSQESVTEQD | | |
| | PQVYTLPPSREEMTKNQVSLTCL | | SKDSTYSLSSTL | | |
| | VKGFYPSDIAVEWESNGQPENNY | | TLSKADYEKHK | | |
| | KTTPPVLDSDGSFLLYSKLTVDK | | VYACEVTHQGL | | |
| | SRWQQGNVFSCSVMHEALHNHY | | SSPVTKSFNRGE | | |
| | TQKSLSLSP | | C | | |
| PS3 | QVQLQQSGPRLVRPSQTLSLTCAI | 1340 | QSALTQPASVS | 1341 | with CD3B376 |
| B135 | SGDSVFNNNAAWSWIRQSPSRGL | | GSPGQSITISCT | | arm (CD3B891 |
| 2 | EWLGRTYYRSKWLYDYAVSVKS | | GTSSNIGTYKFV | | without K477 or |
| | RITVNPDTSRNQFTLQLNSVTPED | | SWYQQHPDKA | | CD3B2197 with |
| | TALYYCARGYSSSFDYWGQGTL | | PKVLLYEVSKR | | K477 in HC1) |
| | VTVSSASTKGPSVFPLAPSSKSTS | | PSGVSSRFSGSK | | HC1 Construct |
| | GGTAALGCLVKDYFPEPVTVSW | | SGNTASLTISGL | | ID: |
| | NSGALTSGVHTFPAVLQSSGLYS | | QAEDQADYHC | | PBD000108469 |
| | LSSWTVPSSSLGTQTYICNVNHK | | VSYAGSGTLLF | | LC1 Contruct |
| | PSNTKVDKKVEPKSCDKTHTCPP | | GGGTKLTVLGQ | | ID: |
| | CPAPEAAGGPSVFLFPPKPKDTL | | PKAAPSVTLFPP | | PBD000108469 |
| | MISRTPEVTCVVVSVSHEDPEVK | | SSEELQANKAT | | |
| | FNWYVDGVEVHNAKTKPREEQY | | LVCLISDFYPGA | | |
| | NSTYRVVSVLTVLHQDWLNGKE | | VTVAWKADSSP | | |
| | YKCKVSNKALPAPIEKTISKAKG | | VKAGVETTTPS | | |
| | QPREPQVYTLPPSREEMTKNQVS | | KQSNNKYAASS | | |
| | LTCLVKGFYPSDIAVEWESNGQP | | YLSLTPEQWKS | | |
| | ENNYKTTPPVLDSDGSFLLYSKL | | HRSYSCQVTHE | | |
| | TVDKSRWQQGNVFSCSVMHEAL | | GSTVEKTVAPT | | |
| | HNHYTQKSLSLSPGK | | ECS | | |
| PS3 | QVQLQQSGPRLVRPSQTLSLTCAI | 1342 | QSALTQPASVS | 1343 | with CD3B376 |
| B135 | SGDSVFNNNAAWSWIRQSPSRGL | | GSPGQSITISCT | | arm (CD3B891 |
| 3 | EWLGRTYYRSKWLYDYAVSVKS | | GTSSNIGTYKFV | | without K477 or |
| | RITVNPDTSRNQFTLQLNSVTPED | | SWYQQHPDKA | | CD3B2197 with |
| | TALYYCARGYSSSFDYWGQGTL | | PKVLLYEVSKR | | K477 in HC1) |
| | VTVSSASTKGPSVFPLAPSSKSTS | | PSGVSSRFSGSK | | HC1 Construct |
| | GGTAALGCLVKDYFPEPVTVSW | | SGNTASLTISGL | | ID: |
| | NSGALTSGVHTFPAVLQSSGLYS | | QAEDQADYHC | | PBD000108469 |
| | LSSWTVPSSSLGTQTYICNVNHK | | VSYAGSGTLLF | | LC1 Contruct |
| | PSNTKVDKKVEPKSCDKTHTCPP | | GGGTKLTVLGQ | | ID: |
| | CPAPEAAGGPSVFLFPPKPKDTL | | PKAAPSVTLFPP | | PBD000108469 |
| | MISRTPEVTCVVVSVSHEDPEVK | | SSEELQANKAT | | |
| | FNWYVDGVEVHNAKTKPREEQY | | LVCLISDFYPGA | | |
| | NSTYRVVSVLTVLHQDWLNGKE | | VTVAWKADSSP | | |
| | YKCKVSNKALPAPIEKTISKAKG | | VKAGVETTTPS | | |
| | QPREPQVYTLPPSREEMTKNQVS | | KQSNNKYAASS | | |
| | LTCLVKGFYPSDIAVEWESNGQP | | YLSLTPEQWKS | | |
| | ENNYKTTPPVLDSDGSFLLYSKL | | HRSYSCQVTHE | | |
| | TVDKSRWQQGNVFSCSVMHEAL | | GSTVEKTVAPT | | |
| | HNHYTQKSLSLSPGK | | ECS | | |
| PS3 | QVQLQQSGPRLVRPSQTLSLTCAI | 1344 | QSALTQPASVS | 1345 | with CD3B376 |
| B135 | SGDSVFNNNAAWSWIRQSPSRGL | | GSPGQSITISCT | | arm (CD3B891 |
| 4 | EWLGRTYYRSKWLYDYAVSVKS | | GTSSNIGTYKFV | | without K477 or |
| | RITVNPDTSRNQFTLQLNSVTPED | | SWYQQHPDKA | | CD3B2197 with |
| | TALYYCARGYSSSFDYWGQGTL | | PKVLLYEVSKR | | K477 in HC1) |
| | VTVSSASTKGPSVFPLAPSSKSTS | | PSGVSSRFSGSK | | HC1 Construct |
| | GGTAALGCLVKDYFPEPVTVSW | | SGNTASLTISGL | | ID: |
| | NSGALTSGVHTFPAVLQSSGLYS | | QAEDQADYHC | | PBD000108469 |
| | LSSVVTVPSSSLGTQTYICNVNHK | | VSYAGSGTLLF | | LC1 Contruct |
| | PSNTKVDKKVEPKSCDKTHTCPP | | GGGTKLTVLGQ | | ID: |
| | CPAPEAAGGPSVFLFPPKPKDTL | | PKAAPSVTLFPP | | PBD000108469 |
| | MISRTPEVTCVVVSVSHEDPEVK | | SSEELQANKAT | | |
| | FNWYVDGVEVHNAKTKPREEQY | | LVCLISDFYPGA | | |
| | NSTYRVVSVLTVLHQDWLNGKE | | VTVAWKADSSP | | |
| | YKCKVSNKALPAPIEKTISKAKG | | VKAGVETTTPS | | |
| | QPREPQVYTLPPSREEMTKNQVS | | KQSNNKYAASS | | |
| | LTCLVKGFYPSDIAVEWESNGQP | | YLSLTPEQWKS | | |
| | ENNYKTTPPVLDSDGSFLLYSKL | | HRSYSCQVTHE | | |
| | TVDKSRWQQGNVFSCSVMHEAL | | GSTVEKTVAPT | | |
| | HNHYTQKSLSLSPGK | | ECS | | |
| PS3 | QVQLQQSGPRLVRPSQTLSLTCAI | 1346 | QSALTQPASVS | 1347 | with CD3B376 |
| B135 | SGDSVFNNNAAWSWIRQSPSRGL | | GSPGQSITISCT | | arm (CD3B891 |
| 5 | EWLGRTYYRSKWLYDYAVSVKS | | GTSSNIGTYKFV | | without K477 or |
| | RITVNPDTSRNQFTLQLNSVTPED | | SWYQQHPDKA | | CD3B2197 with |
| | TALYYCARGYSSSFDYWGQGTL | | PKVLLYEVSKR | | K477 in HC1) |
| | VTVSSASTKGPSVFPLAPSSKSTS | | PSGVSSRFSGSK | | HC1 Construct |
| | GGTAALGCLVKDYFPEPVTVSW | | SGNTASLTISGL | | ID: |
| | NSGALTSGVHTFPAVLQSSGLYS | | QAEDQADYHC | | PBD000108469 |
| | LSSVVTVPSSSLGTQTYICNVNHK | | VSYAGSGTLLF | | LC1 Contruct |
| | PSNTKVDKKVEPKSCDKTHTCPP | | GGGTKLTVLGQ | | ID: |
| | CPAPEAAGGPSVFLFPPKPKDTL | | PKAAPSVTLFPP | | PBD000108469 |
| | MISRTPEVTCVVVSVSHEDPEVK | | SSEELQANKAT | | |
| | FNWYVDGVEVHNAKTKPREEQY | | LVCLISDFYPGA | | |
| | NSTYRVVSVLTVLHQDWLNGKE | | VTVAWKADSSP | | |
| | YKCKVSNKALPAPIEKTISKAKG | | VKAGVETTTPS | | |
| | QPREPQVYTLPPSREEMTKNQVS | | KQSNNKYAASS | | |
| | LTCLVKGFYPSDIAVEWESNGQP | | YLSLTPEQWKS | | |
| | ENNYKTTPPVLDSDGSFLLYSKL | | HRSYSCQVTHE | | |
| | TVDKSRWQQGNVFSCSVMHEAL | | GSTVEKTVAPT | | |
| | HNHYTQKSLSLSPGK | | ECS | | |
| PS3 | QVQLQQSGPGLVKPSQTLSLTCA | 1348 | QSALTQPASVS | 1349 | with CD3B450 |
| B135 | ISGDSVFNNNAAWSWIRQSPSRG | | GSPGQSITISCT | | arm (CD3B2186 |
| 6 | LEWLGRTYYRSKWLYDYAVSVK | | GTSSNIGTYKFV | | without K477 or |
| | SRITINPDTSKNQFSLQLNSVTPE | | SWYQQHPGKA | | CD3B2200 with |
| | DTAVYYCARGYSSSFDYWGQGT | | PKVMIYEVSKR | | K477 in HC1) |
| | LVTVSSASTKGPSVFPLAPSSKST | | PSGVSNRFSGS | | HC1 Construct |
| | SGGTAALGCLVKDYFPEPVTVS | | KSGNTASLTISG | | ID: |
| | WNSGALTSGVHTFPAVLQSSGLY | | LQAEDEADYYC | | PBD000108470 |
| | SLSSVVTVPSSSLGTQTYICNVNH | | VSYAGSGTLLF | | LC1 Contruct |
| | KPSNTKVDKKVEPKSCDKTHTCP | | GGGTKLTVLGQ | | ID: |
| | PCPAPEAAGGPSVFLFPPKPKDTL | | PKAAPSVTLFPP | | PBD000108470 |
| | MISRTPEVTCVVVSVSHEDPEVK | | SSEELQANKAT | | |
| | FNWYVDGVEVHNAKTKPREEQY | | LVCLISDFYPGA | | |
| | NSTYRVVSVLTVLHQDWLNGKE | | VTVAWKADSSP | | |
| | YKCKVSNKALPAPIEKTISKAKG | | VKAGVETTTPS | | |
| | QPREPQVYTLPPSREEMTKNQVS | | KQSNNKYAASS | | |
| | LTCLVKGFYPSDIAVEWESNGQP | | YLSLTPEQWKS | | |
| | ENNYKTTPPVLDSDGSFLLYSKL | | HRSYSCQVTHE | | |
| | TVDKSRWQQGNVFSCSVMHEAL | | GSTVEKTVAPT | | |
| | HNHYTQKSLSLSPGK | | ECS | | |
| PS3 | QVQLQQSGPGLVKPSQTLSLTCA | 1350 | QSALTQPASVS | 1351 | with CD3B450 |
| B135 | ISGDSVFNNNAAWSWIRQSPSRG | | GSPGQSITISCT | | arm (CD3B2186 |
| 7 | LEWLGRTYYRSKWLYDYAVSVK | | GTSSNIGTYKFV | | without K477 or |
| | SRITINPDTSKNQFSLQLNSVTPE | | SWYQQHPGKA | | CD3B2200 with |
| | DTAVYYCARGYSSSFDYWGQGT | | PKVMIYEVSKR | | K477 in HC1) |
| | LVTVSSASTKGPSVFPLAPSSKST | | PSGVSNRFSGS | | HC1 Construct |
| | SGGTAALGCLVKDYFPEPVTVS | | KSGNTASLTISG | | ID: |
| | WNSGALTSGVHTFPAVLQSSGLY | | LQAEDEADYYC | | PBD000108470 |
| | SLSSVVTVPSSSLGTQTYICNVNH | | VSYAGSGTLLF | | LC1 Contruct |
| | KPSNTKVDKKVEPKSCDKTHTCP | | GGGTKLTVLGQ | | ID: |
| | PCPAPEAAGGPSVFLFPPKPKDTL | | PKAAPSVTLFPP | | PBD000108470 |
| | MISRTPEVTCVVVSVSHEDPEVK | | SSEELQANKAT | | |
| | FNWYVDGVEVHNAKTKPREEQY | | LVCLISDFYPGA | | |
| | NSTYRVVSVLTVLHQDWLNGKE | | VTVAWKADSSP | | |
| | YKCKVSNKALPAPIEKTISKAKG | | VKAGVETTTPS | | |
| | QPREPQVYTLPPSREEMTKNQVS | | KQSNNKYAASS | | |
| | LTCLVKGFYPSDIAVEWESNGQP | | YLSLTPEQWKS | | |
| | ENNYKTTPPVLDSDGSFLLYSKL | | HRSYSCQVTHE | | |
| | TVDKSRWQQGNVFSCSVMHEAL | | GSTVEKTVAPT | | |
| | HNHYTQKSLSLSPGK | | ECS | | |
| PS3 | QVQLQQSGPGLVKPSQTLSLTCA | 1352 | QSALTQPASVS | 1353 | with CD3B450 |
| B135 | ISGDSVFNNNAAWSWIRQSPSRG | | GSPGQSITISCT | | arm (CD3B2186 |
| 8 | LEWLGRTYYRSKWLYDYAVSVK | | GTSSNIGTYKFV | | without K477 or |
| | SRITINPDTSKNQFSLQLNSVTPE | | SWYQQHPGKA | | CD3B2200 with |
| | DTAVYYCARGYSSSFDYWGQGT | | PKVMIYEVSKR | | K477 in HC1) |
| | LVTVSSASTKGPSVFPLAPSSKST | | PSGVSNRFSGS | | HC1 Construct |
| | SGGTAALGCLVKDYFPEPVTVS | | KSGNTASLTISG | | ID: |
| | WNSGALTSGVHTFPAVLQSSGLY | | LQAEDEADYYC | | PBD000108470 |
| | SLSSVVTVPSSSLGTQTYICNVNH | | VSYAGSGTLLF | | LC1 Contruct |
| | KPSNTKVDKKVEPKSCDKTHTCP | | GGGTKLTVLGQ | | ID: |
| | PCPAPEAAGGPSVFLFPPKPKDTL | | PKAAPSVTLFPP | | PBD000108470 |
| | MISRTPEVTCVVVSVSHEDPEVK | | SSEELQANKAT | | |
| | FNWYVDGVEVHNAKTKPREEQY | | LVCLISDFYPGA | | |
| | NSTYRVVSVLTVLHQDWLNGKE | | VTVAWKADSSP | | |
| | YKCKVSNKALPAPIEKTISKAKG | | VKAGVETTTPS | | |
| | QPREPQVYTLPPSREEMTKNQVS | | KQSNNKYAASS | | |
| | LTCLVKGFYPSDIAVEWESNGQP | | YLSLTPEQWKS | | |
| | ENNYKTTPPVLDSDGSFLLYSKL | | HRSYSCQVTHE | | |
| | TVDKSRWQQGNVFSCSVMHEAL | | GSTVEKTVAPT | | |
| | HNHYTQKSLSLSPGK | | ECS | | |
| PSM | QVQLQQSGPGLVKPSQTLSLTCA | 1354 | QSALTQPASVS | 1355 | with CD3B450 |
| B937 | ISGDSVFNNNAAWSWIRQSPSRG | | GSPGQSITISCT | | arm (CD3B2186 |
| | LEWLGRTYYRSKWLYDYAVSVK | | GTSSNIGTYKFV | | without K477 or |
| | SRITINPDTSKNQFSLQLNSVTPE | | SWYQQHPGKA | | CD3B2200 with |
| | DTAVYYCARGYSSSFDYWGQGT | | PKVMIYEVSKR | | K477 in HC1) |
| | LVTVSSASTKGPSVFPLAPSSKST | | PSGVSNRFSGS | | HC1 Construct |
| | SGGTAALGCLVKDYFPEPVTVS | | KSGNTASLTISG | | ID: |
| | WNSGALTSGVHTFPAVLQSSGLY | | LQAEDEADYYC | | PBD000100305 |
| | SLSSVVTVPSSSLGTQTYICNVNH | | VSYAGSGTLLF | | LC1 Contruct |
| | KPSNTKVDKKVEPKSCDKTHTCP | | GGGTKLTVLGQ | | ID: |
| | PCPAPEAAGGPSVFLFPPKPKDTL | | PKAAPSVTLFPP | | PBD000045576 |
| | MISRTPEVTCVVVSVSHEDPEVK | | SSEELQANKAT | | |
| | FNWYVDGVEVHNAKTKPREEQY | | LVCLISDFYPGA | | |
| | NSTYRVVSVLTVLHQDWLNGKE | | VTVAWKADSSP | | |
| | YKCKVSNKALPAPIEKTISKAKG | | VKAGVETTTPS | | |
| | QPREPQVYTLPPSREEMTKNQVS | | KQSNNKYAASS | | |
| | LTCLVKGFYPSDIAVEWESNGQP | | YLSLTPEQWKS | | |
| | ENNYKTTPPVLDSDGSFLLYSKL | | HRSYSCQVTHE | | |
| | TVDKSRWQQGNVFSCSVMHEAL | | GSTVEKTVAPT | | |
| | HNHYTQKSLSLSPG | | ECS | | |

TABLE 63
PSMA × CD3 Bispecific Antibodies: PSMA Arm Descriptions

| | | SEQ | | SEQ | PSMA |
|---|---|---|---|---|---|
| | | ID | | ID | Arm |
| Name | HC2 | NO. | LC2 | NO. | Description |
| PS3B | EVQLVESGGGLVKPGGSLRLSCAAS | 1356 | QSVLTQPPSVSG | 1357 | PSMB889 |
| 917 | GFTFSRYNMNWVRQAPGKGLEWV | | APGQRVTISCTG | | HC2 |
| | SSINSNSRYIYYADSVKGRFTISRDS | | SSFNLGAGYDV | | Construct |
| | AKNSLYLQMNSLRAEDTAVYYCAK | | HWYQQVPGTVP | | ID: |
| | TMGDYYYYYGMDVWGQGTTVTVS | | KLLIYDNSNRPS | | PBD000101 |
| | SASTKGPSVFPLAPSSKSTSGGTAAL | | GVPDRFSGSKSG | | 312 |
| | GCLVKDYFPEPVTVSWNSGALTSG | | TSASLAITGLQA | | |
| | VHTFPAVLQSSGLYSLSSVVTVPSSS | | EDETVYYCQSY | | |
| | LGTQTYICNVNHKPSNTKVDKKVEP | | DSSLSGVVFGGG | | |
| | KSCDKTHTCPPCPAPEAAGGPSVFL | | TKLTVLGQPKA | | |
| | FPPKPKDTLMISRTPEVTCVVVSVSH | | APSVTLFPPSSEE | | |
| | EDPEVKFNWYVDGVEVHNAKTKPR | | LQANKATLVCLI | | |
| | EEQYNSTYRVVSVLTVLHQDWLNG | | SDFYPGAVTVA | | |
| | KEYKCKVSNKALPAPIEKTISKAKG | | WKADSSPVKAG | | |
| | QPREPQVYTLPPSREEMTKNQVSLT | | VETTTPSKQSNN | | |
| | CLVKGFYPSDIAVEWESNGQPENNY | | KYAASSYLSLTP | | |
| | KTTPPVLDSDGSFFLYSRLTVDKSR | | EQWKSHRSYSC | | |
| | WQQGNVFSCSVMHEALHNHYTQK | | QVTHEGSTVEKT | | |
| | SLSLSPG | | VAPTECS | | |
| PS3B | EVQLVESGGGLVKPGGSLRLSCAAS | 1358 | SSELTQPPSVSG | 1359 | PSMB890 |
| 918 | GFTFSRYNMNWVRQAPGKGLEWV | | APGQRVTISCAG | | HC2 |
| | SSINSNSRYIYYADSVKGRFTISRDS | | SLSNIGAGYDVH | | Construct |
| | AKNSLYLQMNSLRAEDTAVYYCAK | | WYQQLPGTAPK | | ID: |
| | TMGDYYYYYGMDVWGQGTTVTVS | | LLIYGNINRLSG | | PBD000101 |
| | SASTKGPSVFPLAPSSKSTSGGTAAL | | VPERFSGSKSGT | | 312 |
| | GCLVKDYFPEPVTVSWNSGALTSG | | SASLAITGLQAE | | |
| | VHTFPAVLQSSGLYSLSSVVTVPSSS | | DGADYYCQSYD | | |
| | LGTQTYICNVNHKPSNTKVDKKVEP | | SSLSSYVFGTGT | | |
| | KSCDKTHTCPPCPAPEAAGGPSVFL | | KVTVLGQPKAA | | |
| | FPPKPKDTLMISRTPEVTCVVVSVSH | | PSVTLFPPSSEEL | | |
| | EDPEVKFNWYVDGVEVHNAKTKPR | | QANKATLVCLIS | | |
| | EEQYNSTYRVVSVLTVLHQDWLNG | | DFYPGAVTVAW | | |
| | KEYKCKVSNKALPAPIEKTISKAKG | | KADSSPVKAGV | | |
| | QPREPQVYTLPPSREEMTKNQVSLT | | etttpskqsnnk | | |
| | CLVKGFYPSDIAVEWESNGQPENNY | | YAASSYLSLTPE | | |
| | KTTPPVLDSDGSFFLYSRLTVDKSR | | QWKSHRSYSCQ | | |
| | WQQGNVFSCSVMHEALHNHYTQK | | VTHEGSTVEKTV | | |
| | SLSLSPG | | APTECS | | |
| PS3B | EVQLVESGGGVVQPGRSLRLSCAAS | 1360 | QSVLTQPPSASG | 1361 | PSMB891 |
| 913 | GFTFITYGMHWVRQAPGKGLEWVA | | TPGQGVTISCSG | | HC2 |
| | VVSFDESNKYYADSVKGRFTISRDN | | SSSNIGSNTVNW | | Construct |
| | SKNTLYLQMNSLRAEDTAVYYCAR | | FQQLPGTAPKLL | | ID: |
| | ALRDGNNWDYFNGMDVWGQGTT | | IYSDNQRPSGVP | | PBD000101 |
| | VTVSSASTKGPSVFPLAPSSKSTSGG | | DRFSGSKSGTSA | | 316 |
| | TAALGCLVKDYFPEPVTVSWNSGA | | SLAISGLQSEDE | | |
| | LTSGVHTFPAVLQSSGLYSLSSVVT | | ADYYCAAWDDS | | |
| | VPSSSLGTQTYICNVNHKPSNTKVD | | LNGYVFGTGTK | | |
| | KKVEPKSCDKTHTCPPCPAPEAAGG | | VTVLGQPKAAPS | | |
| | PSVFLFPPKPKDTLMISRTPEVTCVV | | VTLFPPSSEELQA | | |
| | VSVSHEDPEVKFNWYVDGVEVHNA | | NKATLVCLISDF | | |
| | KTKPREEQYNSTYRVVSVLTVLHQ | | YPGAVTVAWKA | | |
| | DWLNGKEYKCKVSNKALPAPIEKTI | | DSSPVKAGVETT | | |
| | SKAKGQPREPQVYTLPPSREEMTKN | | TPSKQSNNKYA | | |
| | QVSLTCLVKGFYPSDIAVEWESNGQ | | ASSYLSLTPEQW | | |
| | PENNYKTTPPVLDSDGSFFLYSRLT | | KSHRSYSCQVTH | | |
| | VDKSRWQQGNVFSCSVMHEALHN | | EGSTVEKTVAPT | | |
| | HYTQKSLSLSPG | | ECS | | |
| PS3B | EVQLVESGGGVVQPGRSLRLSCAAS | 1362 | QSVLTQPPSVSG | 1363 | PSMB892 |
| 915 | GFTFITYGMHWVRQAPGKGLEWVA | | APGQRVTISCTG | | HC2 |
| | VVSFDESNKYYADSVKGRFTISRDN | | SSSNIGADYDVH | | Construct |
| | SKNTLYLQMNSLRAEDTAVYYCAR | | WYQHLPGTAPK | | ID: |
| | ALRDGNNWDYFNGMDVWGQGTT | | LLIYGNSNRPSG | | PBD000101 |
| | VTVSSASTKGPSVFPLAPSSKSTSGG | | VPDRFSGSKSGT | | 316 |
| | TAALGCLVKDYFPEPVTVSWNSGA | | SASLAITGLQAE | | |
| | LTSGVHTFPAVLQSSGLYSLSSVVT | | DETDYYCQSYD | | |
| | VPSSSLGTQTYICNVNHKPSNTKVD | | SSLSGWVFGGGT | | |
| | KKVEPKSCDKTHTCPPCPAPEAAGG | | KLTVLGQPKAAP | | |
| | PSVFLFPPKPKDTLMISRTPEVTCVV | | SVTLFPPSSEELQ | | |
| | VSVSHEDPEVKFNWYVDGVEVHNA | | ANKATLVCLISD | | |
| | KTKPREEQYNSTYRVVSVLTVLHQ | | FYPGAVTVAWK | | |
| | DWLNGKEYKCKVSNKALPAPIEKTI | | ADSSPVKAGVET | | |
| | SKAKGQPREPQVYTLPPSREEMTKN | | TTPSKQSNNKYA | | |
| | QVSLTCLVKGFYPSDIAVEWESNGQ | | ASSYLSLTPEQW | | |
| | PENNYKTTPPVLDSDGSFFLYSRLT | | KSHRSYSCQVTH | | |
| | VDKSRWQQGNVFSCSVMHEALHN | | EGSTVEKTVAPT | | |
| | HYTQKSLSLSPG | | ECS | | |
| PS3B | QVQLVESGGGVVQPGRSLRLSCVA | 1364 | QSVLTQPPSASG | 1365 | PSMB893 |
| 914 | SGFTFSSYGIHWVRQAPGKGLEWV | | TPGQGVTISCSG | | HC2 |
| | AVIWYDGSNKYYADSVKGRFTISR | | SSSNIGSNTVNW | | Construct |
| | DNSKNTLYLQMNSLRAEDTAVYYS | | FQQLPGTAPKLL | | ID: |
| | VRGVGPTSYYYNYGMDVWGQGTT | | IYSDNQRPSGVP | | PBD000101 |
| | VTVSSASTKGPSVFPLAPSSKSTSGG | | DRFSGSKSGTSA | | 318 |
| | TAALGCLVKDYFPEPVTVSWNSGA | | SLAISGLQSEDE | | |
| | LTSGVHTFPAVLQSSGLYSLSSVVT | | ADYYCAAWDDS | | |
| | VPSSSLGTQTYICNVNHKPSNTKVD | | LNGYVFGTGTK | | |
| | KKVEPKSCDKTHTCPPCPAPEAAGG | | VTVLGQPKAAPS | | |
| | PSVFLFPPKPKDTLMISRTPEVTCVV | | VTLFPPSSEELQA | | |
| | VSVSHEDPEVKFNWYVDGVEVHNA | | NKATLVCLISDF | | |
| | KTKPREEQYNSTYRVVSVLTVLHQ | | YPGAVTVAWKA | | |
| | DWLNGKEYKCKVSNKALPAPIEKTI | | DSSPVKAGVETT | | |
| | SKAKGQPREPQVYTLPPSREEMTKN | | TPSKQSNNKYA | | |
| | QVSLTCLVKGFYPSDIAVEWESNGQ | | ASSYLSLTPEQW | | |
| | PENNYKTTPPVLDSDGSFFLYSRLT | | KSHRSYSCQVTH | | |
| | VDKSRWQQGNVFSCSVMHEALHN | | EGSTVEKTVAPT | | |
| | HYTQKSLSLSPG | | ECS | | |
| PS3B | QVQLVESGGGVVQPGRSLRLSCVA | 1366 | QSVLTQPPSVSG | 1367 | PSMB894 |
| 916 | SGFTFSSYGIHWVRQAPGKGLEWV | | APGQRVTISCTG | | HC2 |
| | AVIWYDGSNKYYADSVKGRFTISR | | SSSNIGADYDVH | | Construct |
| | DNSKNTLYLQMNSLRAEDTAVYYS | | WYQHLPGTAPK | | ID: |
| | VRGVGPTSYYYNYGMDVWGQGTT | | LLIYGNSNRPSG | | PBD000101 |
| | VTVSSASTKGPSVFPLAPSSKSTSGG | | VPDRFSGSKSGT | | 318 |
| | TAALGCLVKDYFPEPVTVSWNSGA | | SASLAITGLQAE | | |
| | LTSGVHTFPAVLQSSGLYSLSSVVT | | DETDYYCQSYD | | |
| | VPSSSLGTQTYICNVNHKPSNTKVD | | SSLSGWVFGGGT | | |
| | KKVEPKSCDKTHTCPPCPAPEAAGG | | KLTVLGQPKAAP | | |
| | PSVFLFPPKPKDTLMISRTPEVTCVV | | SVTLFPPSSEELQ | | |
| | VSVSHEDPEVKFNWYVDGVEVHNA | | ANKATLVCLISD | | |
| | KTKPREEQYNSTYRVVSVLTVLHQ | | FYPGAVTVAWK | | |
| | DWLNGKEYKCKVSNKALPAPIEKTI | | ADSSPVKAGVET | | |
| | SKAKGQPREPQVYTLPPSREEMTKN | | TTPSKQSNNKYA | | |
| | QVSLTCLVKGFYPSDIAVEWESNGQ | | ASSYLSLTPEQW | | |
| | PENNYKTTPPVLDSDGSFFLYSRLT | | KSHRSYSCQVTH | | |
| | VDKSRWQQGNVFSCSVMHEALHN | | EGSTVEKTVAPT | | |
| | HYTQKSLSLSPG | | ECS | | |
| PS3B | [sequence omitted] | 1368 | QSVLTQPPSVSA | 1369 | PSMB895 |
| 919 | GFTFSSYAMSWVRQAPGKGLEWVS | | APGQKVTISCSG | | HC2 |
| | AISGGIGSTYYADSVKGRFTISRDNS | | SSSNIGNNYVSW | | Construct |
| | KNTLWLQMNSLRAEDTAVYYCAK | | YQQLPGTAPKLL | | ID: |
| | DGVGATPYYFDYWGQGTLVTVSSA | | IYDNNKRPSGIP | | PBD000101 |
| | STKGPSVFPLAPSSKSTSGGTAALGC | | DRFSGSKSGTSA | | 320 |
| | LVKDYFPEPVTVSWNSGALTSGVH | | TLGITGLQTGDE | | |
| | TFPAVLQSSGLYSLSSVVTVPSSSLG | | ADYYCGTWDSS | | |
| | TQTYICNVNHKPSNTKVDKKVEPKS | | LSAYVFGTGTKV | | |
| | CDKTHTCPPCPAPEAAGGPSVFLFPP | | TVLGQPKAAPSV | | |
| | KPKDTLMISRTPEVTCVVVSVSHED | | TLFPPSSEELQAN | | |
| | PEVKFNWYVDGVEVHNAKTKPREE | | KATLVCLISDFY | | |
| | QYNSTYRVVSVLTVLHQDWLNGKE | | PGAVTVAWKAD | | |
| | YKCKVSNKALPAPIEKTISKAKGQP | | SSPVKAGVETTT | | |
| | REPQVYTLPPSREEMTKNQVSLTCL | | PSKQSNNKYAAS | | |
| | VKGFYPSDIAVEWESNGQPENNYK | | SYLSLTPEQWKS | | |
| | TTPPVLDSDGSFFLYSRLTVDKSRW | | HRSYSCQVTHEG | | |
| | QQGNVFSCSVMHEALHNHYTQKSL | | STVEKTVAPTEC | | |
| | SLSPG | | S | | |
| PS3B | [sequence omitted] | 1370 | QSVLTQPPSVSA | 1371 | PSMB896 |
| 921 | GFTFSSYAMSWVRQAPGKGLEWVS | | APGQKVTISCSG | | HC2 |
| | AISGGIGSTYYADSVKGRFTISRDNS | | SSSNIGINYVSW | | Construct |
| | KNTLWLQMNSLRAEDTAVYYCAK | | YQQLPGTAPKLL | | ID: |
| | DGVGATPYYFDYWGQGTLVTVSSA | | IYDNNKRPSGIP | | PBD000101 |
| | STKGPSVFPLAPSSKSTSGGTAALGC | | DRFSGSKSGTSA | | 320 |
| | LVKDYFPEPVTVSWNSGALTSGVH | | TLGITGLQTGDE | | |
| | TFPAVLQSSGLYSLSSVVTVPSSSLG | | ADYYCGTWDSS | | |
| | TQTYICNVNHKPSNTKVDKKVEPKS | | LSAVVFGGGTKL | | |
| | CDKTHTCPPCPAPEAAGGPSVFLFPP | | TVLGQPKAAPSV | | |
| | KPKDTLMISRTPEVTCVVVSVSHED | | TLFPPSSEELQAN | | |
| | PEVKFNWYVDGVEVHNAKTKPREE | | KATLVCLISDFY | | |
| | QYNSTYRVVSVLTVLHQDWLNGKE | | PGAVTVAWKAD | | |
| | YKCKVSNKALPAPIEKTISKAKGQP | | SSPVKAGVETTT | | |
| | REPQVYTLPPSREEMTKNQVSLTCL | | PSKQSNNKYAAS | | |
| | VKGFYPSDIAVEWESNGQPENNYK | | SYLSLTPEQWKS | | |
| | TTPPVLDSDGSFFLYSRLTVDKSRW | | HRSYSCQVTHEG | | |
| | QQGNVFSCSVMHEALHNHYTQKSL | | STVEKTVAPTEC | | |
| | SLSPG | | s | | |
| PS3B | [sequence omitted] | 1372 | QSVLTQPPSVSA | 1373 | PSMB897 |
| 920 | GFTFSSYAMSWVRQAPGKGLEWVS | | APGQKVTISCSG | | HC2 |
| | AISGGSGSTYYADSVKGRFTISRDNS | | SSSNIGNNYVSW | | Construct |
| | KNTLYLQMNSLRAEDSAVYYCAKD | | YQQLPGTAPKLL | | ID: |
| | GVGATPYYFDYWGQGTLVTVSSAS | | IYDNNKRPSGIP | | PBD000101 |
| | TKGPSVFPLAPSSKSTSGGTAALGCL | | DRFSGSKSGTSA | | 322 |
| | VKDYFPEPVTVSWNSGALTSGVHTF | | TLGITGLQTGDE | | |
| | PAVLQSSGLYSLSSVVTVPSSSLGTQ | | ADYYCGTWDSS | | |
| | TYICNVNHKPSNTKVDKKVEPKSCD | | LSAYVFGTGTKV | | |
| | KTHTCPPCPAPEAAGGPSVFLFPPKP | | TVLGQPKAAPSV | | |
| | KDTLMISRTPEVTCVVVSVSHEDPE | | TLFPPSSEELQAN | | |
| | VKFNWYVDGVEVHNAKTKPREEQ | | KATLVCLISDFY | | |
| | YNSTYRVVSVLTVLHQDWLNGKEY | | PGAVTVAWKAD | | |
| | KCKVSNKALPAPIEKTISKAKGQPR | | SSPVKAGVETTT | | |
| | EPQVYTLPPSREEMTKNQVSLTCLV | | PSKQSNNKYAAS | | |
| | KGFYPSDIAVEWESNGQPENNYKTT | | SYLSLTPEQWKS | | |
| | PPVLDSDGSFFLYSRLTVDKSRWQQ | | HRSYSCQVTHEG | | |
| | GNVFSCSVMHEALHNHYTQKSLSL | | STVEKTVAPTEC | | |
| | SPG | | s | | |
| PS3B | [sequence omitted] | 1374 | QSVLTQPPSVSA | 1375 | PSMB898 |
| 922 | GFTFSSYAMSWVRQAPGKGLEWVS | | APGQKVTISCSG | | HC2 |
| | AISGGSGSTYYADSVKGRFTISRDNS | | SSSNIGINYVSW | | Construct |
| | KNTLYLQMNSLRAEDSAVYYCAKD | | YQQLPGTAPKLL | | ID: |
| | GVGATPYYFDYWGQGTLVTVSSAS | | IYDNNKRPSGIP | | PBD000101 |
| | TKGPSVFPLAPSSKSTSGGTAALGCL | | DRFSGSKSGTSA | | 322 |
| | VKDYFPEPVTVSWNSGALTSGVHTF | | TLGITGLQTGDE | | |
| | PAVLQSSGLYSLSSVVTVPSSSLGTQ | | ADYYCGTWDSS | | |
| | TYICNVNHKPSNTKVDKKVEPKSCD | | LSAVVFGGGTKL | | |
| | KTHTCPPCPAPEAAGGPSVFLFPPKP | | TVLGQPKAAPSV | | |
| | KDTLMISRTPEVTCVVVSVSHEDPE | | TLFPPSSEELQAN | | |
| | VKFNWYVDGVEVHNAKTKPREEQ | | KATLVCLISDFY | | |
| | YNSTYRVVSVLTVLHQDWLNGKEY | | PGAVTVAWKAD | | |
| | KCKVSNKALPAPIEKTISKAKGQPR | | SSPVKAGVETTT | | |
| | EPQVYTLPPSREEMTKNQVSLTCLV | | PSKQSNNKYAAS | | |
| | KGFYPSDIAVEWESNGQPENNYKTT | | SYLSLTPEQWKS | | |
| | PPVLDSDGSFFLYSRLTVDKSRWQQ | | HRSYSCQVTHEG | | |
| | GNVFSCSVMHEALHNHYTQKSLSL | | STVEKTVAPTEC | | |
| | SPG | | s | | |
| PS3B | EVQLVESGGGLVQPGGSLRLSCTAS | 1376 | QSVLTQPPSVSA | 1377 | PSMB899 |
| 912 | GFIFSSYAMSWVRQAPGKGLEWVS | | APGQKVTISCSG | | HC2 |
| | AISGGYGAPYYADTVKGRFTISRDN | | SSSNIGNNYVSW | | Construct |
| | SKNTLYLQMNSLRAEDTAVYYCAK | | YQQLPGTAPKLL | | ID: |
| | DGVGATPYYFDDWGQGILVTVSSA | | IFDNNKRPSGIPD | | PBD000101 |
| | STKGPSVFPLAPSSKSTSGGTAALGC | | RFSGSKSGTSAT | | 324 |
| | LVKDYFPEPVTVSWNSGALTSGVH | | LGITGLQTGDEA | | |
| | TFPAVLQSSGLYSLSSVVTVPSSSLG | | DYYCGTWDSSL | | |
| | TQTYICNVNHKPSNTKVDKKVEPKS | | SAYVFGTGTKVT | | |
| | CDKTHTCPPCPAPEAAGGPSVFLFPP | | VLGQPKAAPSVT | | |
| | KPKDTLMISRTPEVTCVVVSVSHED | | LFPPSSEELQAN | | |
| | PEVKFNWYVDGVEVHNAKTKPREE | | KATLVCLISDFY | | |
| | QYNSTYRVVSVLTVLHQDWLNGKE | | PGAVTVAWKAD | | |
| | YKCKVSNKALPAPIEKTISKAKGQP | | SSPVKAGVETTT | | |
| | REPQVYTLPPSREEMTKNQVSLTCL | | PSKQSNNKYAAS | | |
| | VKGFYPSDIAVEWESNGQPENNYK | | SYLSLTPEQWKS | | |
| | TTPPVLDSDGSFFLYSRLTVDKSRW | | HRSYSCQVTHEG | | |
| | QQGNVFSCSVMHEALHNHYTQKSL | | STVEKTVAPTEC | | |
| | SLSPG | | s | | |
| PS3B | EVQLVESGGGLVKPGGSLRLSCAAS | 1378 | QSVLTQPPSVSG | 1379 | PSMB889 |
| 930 | GFTFSRYNMNWVRQAPGKGLEWV | | APGQRVTISCTG | | HC2 |
| | SSINSNSRYIYYADSVKGRFTISRDS | | SSFNLGAGYDV | | Construct |
| | AKNSLYLQMNSLRAEDTAVYYCAK | | HWYQQVPGTVP | | ID: |
| | TMGDYYYYYGMDVWGQGTTVTVS | | KLLIYDNSNRPS | | PBD000101 |
| | SASTKGPSVFPLAPSSKSTSGGTAAL | | GVPDRFSGSKSG | | 312 |
| | GCLVKDYFPEPVTVSWNSGALTSG | | TSASLAITGLQA | | |
| | VHTFPAVLQSSGLYSLSSVVTVPSSS | | EDETVYYCQSY | | |
| | LGTQTYICNVNHKPSNTKVDKKVEP | | DSSLSGVVFGGG | | |
| | KSCDKTHTCPPCPAPEAAGGPSVFL | | TKLTVLGQPKA | | |
| | FPPKPKDTLMISRTPEVTCVVVSVSH | | APSVTLFPPSSEE | | |
| | EDPEVKFNWYVDGVEVHNAKTKPR | | LQANKATLVCLI | | |
| | EEQYNSTYRVVSVLTVLHQDWLNG | | SDFYPGAVTVA | | |
| | KEYKCKVSNKALPAPIEKTISKAKG | | WKADSSPVKAG | | |
| | QPREPQVYTLPPSREEMTKNQVSLT | | VETTTPSKQSNN | | |
| | CLVKGFYPSDIAVEWESNGQPENNY | | KYAASSYLSLTP | | |
| | KTTPPVLDSDGSFFLYSRLTVDKSR | | EQWKSHRSYSC | | |
| | WQQGNVFSCSVMHEALHNHYTQK | | QVTHEGSTVEKT | | |
| | SLSLSPG | | VAPTECS | | |
| PS3B | EVQLVESGGGLVKPGGSLRLSCAAS | 1380 | SSELTQPPSVSG | 1381 | PSMB890 |
| 931 | GFTFSRYNMNWVRQAPGKGLEWV | | APGQRVTISCAG | | HC2 |
| | SSINSNSRYIYYADSVKGRFTISRDS | | SLSNIGAGYDVH | | Construct |
| | AKNSLYLQMNSLRAEDTAVYYCAK | | WYQQLPGTAPK | | ID: |
| | TMGDYYYYYGMDVWGQGTTVTVS | | LLIYGNINRLSG | | PBD000101 |
| | SASTKGPSVFPLAPSSKSTSGGTAAL | | VPERFSGSKSGT | | 312 |
| | GCLVKDYFPEPVTVSWNSGALTSG | | SASLAITGLQAE | | |
| | VHTFPAVLQSSGLYSLSSVVTVPSSS | | DGADYYCQSYD | | |
| | LGTQTYICNVNHKPSNTKVDKKVEP | | SSLSSYVFGTGT | | |
| | KSCDKTHTCPPCPAPEAAGGPSVFL | | KVTVLGQPKAA | | |
| | FPPKPKDTLMISRTPEVTCVVVSVSH | | PSVTLFPPSSEEL | | |
| | EDPEVKFNWYVDGVEVHNAKTKPR | | QANKATLVCLIS | | |
| | EEQYNSTYRVVSVLTVLHQDWLNG | | DFYPGAVTVAW | | |
| | KEYKCKVSNKALPAPIEKTISKAKG | | KADSSPVKAGV | | |
| | QPREPQVYTLPPSREEMTKNQVSLT | | ETTTPSKQSNNK | | |
| | CLVKGFYPSDIAVEWESNGQPENNY | | YAASSYLSLTPE | | |
| | KTTPPVLDSDGSFFLYSRLTVDKSR | | QWKSHRSYSCQ | | |
| | WQQGNVFSCSVMHEALHNHYTQK | | VTHEGSTVEKTV | | |
| | SLSLSPG | | APTECS | | |
| PS3B | EVQLVESGGGVVQPGRSLRLSCAAS | 1382 | QSVLTQPPSASG | 1383 | PSMB891 |
| 926 | GFTFITYGMHWVRQAPGKGLEWVA | | TPGQGVTISCSG | | HC2 |
| | VVSFDESNKYYADSVKGRFTISRDN | | SSSNIGSNTVNW | | Construct |
| | SKNTLYLQMNSLRAEDTAVYYCAR | | FQQLPGTAPKLL | | ID: |
| | ALRDGNNWDYFNGMDVWGQGTT | | IYSDNQRPSGVP | | PBD000101 |
| | VTVSSASTKGPSVFPLAPSSKSTSGG | | DRFSGSKSGTSA | | 316 |
| | TAALGCLVKDYFPEPVTVSWNSGA | | SLAISGLQSEDE | | |
| | LTSGVHTFPAVLQSSGLYSLSSVVT | | ADYYCAAWDDS | | |
| | VPSSSLGTQTYICNVNHKPSNTKVD | | LNGYVFGTGTK | | |
| | KKVEPKSCDKTHTCPPCPAPEAAGG | | VTVLGQPKAAPS | | |
| | PSVFLFPPKPKDTLMISRTPEVTCVV | | VTLFPPSSEELQA | | |
| | VSVSHEDPEVKFNWYVDGVEVHNA | | NKATLVCLISDF | | |
| | KTKPREEQYNSTYRVVSVLTVLHQ | | YPGAVTVAWKA | | |
| | DWLNGKEYKCKVSNKALPAPIEKTI | | DSSPVKAGVETT | | |
| | SKAKGQPREPQVYTLPPSREEMTKN | | TPSKQSNNKYA | | |
| | QVSLTCLVKGFYPSDIAVEWESNGQ | | ASSYLSLTPEQW | | |
| | PENNYKTTPPVLDSDGSFFLYSRLT | | KSHRSYSCQVTH | | |
| | VDKSRWQQGNVFSCSVMHEALHN | | EGSTVEKTVAPT | | |
| | HYTQKSLSLSPG | | ECS | | |
| PS3B | EVQLVESGGGVVQPGRSLRLSCAAS | 1384 | QSVLTQPPSVSG | 1385 | PSMB892 |
| 928 | GFTFITYGMHWVRQAPGKGLEWVA | | APGQRVTISCTG | | HC2 |
| | VVSFDESNKYYADSVKGRFTISRDN | | SSSNIGADYDVH | | Construct |
| | SKNTLYLQMNSLRAEDTAVYYCAR | | WYQHLPGTAPK | | ID: |
| | ALRDGNNWDYFNGMDVWGQGTT | | LLIYGNSNRPSG | | PBD000101 |
| | VTVSSASTKGPSVFPLAPSSKSTSGG | | VPDRFSGSKSGT | | 316 |
| | TAALGCLVKDYFPEPVTVSWNSGA | | SASLAITGLQAE | | |
| | LTSGVHTFPAVLQSSGLYSLSSVVT | | DETDYYCQSYD | | |
| | VPSSSLGTQTYICNVNHKPSNTKVD | | SSLSGWVFGGGT | | |
| | KKVEPKSCDKTHTCPPCPAPEAAGG | | KLTVLGQPKAAP | | |
| | PSVFLFPPKPKDTLMISRTPEVTCVV | | SVTLFPPSSEELQ | | |
| | VSVSHEDPEVKFNWYVDGVEVHNA | | ANKATLVCLISD | | |
| | KTKPREEQYNSTYRVVSVLTVLHQ | | FYPGAVTVAWK | | |
| | DWLNGKEYKCKVSNKALPAPIEKTI | | ADSSPVKAGVET | | |
| | SKAKGQPREPQVYTLPPSREEMTKN | | TTPSKQSNNKYA | | |
| | QVSLTCLVKGFYPSDIAVEWESNGQ | | ASSYLSLTPEQW | | |
| | PENNYKTTPPVLDSDGSFFLYSRLT | | KSHRSYSCQVTH | | |
| | VDKSRWQQGNVFSCSVMHEALHN | | EGSTVEKTVAPT | | |
| | HYTQKSLSLSPG | | ECS | | |
| PS3B | QVQLVESGGGVVQPGRSLRLSCVA | 1386 | QSVLTQPPSASG | 1387 | PSMB893 |
| 927 | SGFTFSSYGIHWVRQAPGKGLEWV | | TPGQGVTISCSG | | HC2 |
| | AVIWYDGSNKYYADSVKGRFTISR | | SSSNIGSNTVNW | | Construct |
| | DNSKNTLYLQMNSLRAEDTAVYYS | | FQQLPGTAPKLL | | ID: |
| | VRGVGPTSYYYNYGMDVWGQGTT | | IYSDNQRPSGVP | | PBD000101 |
| | VTVSSASTKGPSVFPLAPSSKSTSGG | | DRFSGSKSGTSA | | 318 |
| | TAALGCLVKDYFPEPVTVSWNSGA | | SLAISGLQSEDE | | |
| | LTSGVHTFPAVLQSSGLYSLSSVVT | | ADYYCAAWDDS | | |
| | VPSSSLGTQTYICNVNHKPSNTKVD | | LNGYVFGTGTK | | |
| | KKVEPKSCDKTHTCPPCPAPEAAGG | | VTVLGQPKAAPS | | |
| | PSVFLFPPKPKDTLMISRTPEVTCVV | | VTLFPPSSEELQA | | |
| | VSVSHEDPEVKFNWYVDGVEVHNA | | NKATLVCLISDF | | |
| | KTKPREEQYNSTYRVVSVLTVLHQ | | YPGAVTVAWKA | | |
| | DWLNGKEYKCKVSNKALPAPIEKTI | | DSSPVKAGVETT | | |
| | SKAKGQPREPQVYTLPPSREEMTKN | | TPSKQSNNKYA | | |
| | QVSLTCLVKGFYPSDIAVEWESNGQ | | ASSYLSLTPEQW | | |
| | PENNYKTTPPVLDSDGSFFLYSRLT | | KSHRSYSCQVTH | | |
| | VDKSRWQQGNVFSCSVMHEALHN | | EGSTVEKTVAPT | | |
| | HYTQKSLSLSPG | | ECS | | |
| PS3B | QVQLVESGGGVVQPGRSLRLSCVA | 1388 | QSVLTQPPSVSG | 1389 | PSMB894 |
| 929 | SGFTFSSYGIHWVRQAPGKGLEWV | | APGQRVTISCTG | | HC2 |
| | AVIWYDGSNKYYADSVKGRFTISR | | SSSNIGADYDVH | | Construct |
| | DNSKNTLYLQMNSLRAEDTAVYYS | | WYQHLPGTAPK | | ID: |
| | VRGVGPTSYYYNYGMDVWGQGTT | | LLIYGNSNRPSG | | PBD000101 |
| | VTVSSASTKGPSVFPLAPSSKSTSGG | | VPDRFSGSKSGT | | 318 |
| | TAALGCLVKDYFPEPVTVSWNSGA | | SASLAITGLQAE | | |
| | LTSGVHTFPAVLQSSGLYSLSSVVT | | DETDYYCQSYD | | |
| | VPSSSLGTQTYICNVNHKPSNTKVD | | SSLSGWVFGGGT | | |
| | KKVEPKSCDKTHTCPPCPAPEAAGG | | KLTVLGQPKAAP | | |
| | PSVFLFPPKPKDTLMISRTPEVTCVV | | SVTLFPPSSEELQ | | |
| | VSVSHEDPEVKFNWYVDGVEVHNA | | ANKATLVCLISD | | |
| | KTKPREEQYNSTYRVVSVLTVLHQ | | FYPGAVTVAWK | | |
| | DWLNGKEYKCKVSNKALPAPIEKTI | | ADSSPVKAGVET | | |
| | SKAKGQPREPQVYTLPPSREEMTKN | | TTPSKQSNNKYA | | |
| | QVSLTCLVKGFYPSDIAVEWESNGQ | | ASSYLSLTPEQW | | |
| | PENNYKTTPPVLDSDGSFFLYSRLT | | KSHRSYSCQVTH | | |
| | VDKSRWQQGNVFSCSVMHEALHN | | EGSTVEKTVAPT | | |
| | HYTQKSLSLSPG | | ECS | | |
| PS3B | [sequence omitted] | 1390 | QSVLTQPPSVSA | 1391 | PSMB895 |
| 932 | GFTFSSYAMSWVRQAPGKGLEWVS | | APGQKVTISCSG | | HC2 |
| | AISGGIGSTYYADSVKGRFTISRDNS | | SSSNIGNNYVSW | | Construct |
| | KNTLWLQMNSLRAEDTAVYYCAK | | YQQLPGTAPKLL | | ID: |
| | DGVGATPYYFDYWGQGTLVTVSSA | | IYDNNKRPSGIP | | PBD000101 |
| | STKGPSVFPLAPSSKSTSGGTAALGC | | DRFSGSKSGTSA | | 320 |
| | LVKDYFPEPVTVSWNSGALTSGVH | | TLGITGLQTGDE | | |
| | TFPAVLQSSGLYSLSSVVTVPSSSLG | | ADYYCGTWDSS | | |
| | TQTYICNVNHKPSNTKVDKKVEPKS | | LSAYVFGTGTKV | | |
| | CDKTHTCPPCPAPEAAGGPSVFLFPP | | TVLGQPKAAPSV | | |
| | KPKDTLMISRTPEVTCVVVSVSHED | | TLFPPSSEELQAN | | |
| | PEVKFNWYVDGVEVHNAKTKPREE | | KATLVCLISDFY | | |
| | QYNSTYRVVSVLTVLHQDWLNGKE | | PGAVTVAWKAD | | |
| | YKCKVSNKALPAPIEKTISKAKGQP | | SSPVKAGVETTT | | |
| | REPQVYTLPPSREEMTKNQVSLTCL | | PSKQSNNKYAAS | | |
| | VKGFYPSDIAVEWESNGQPENNYK | | SYLSLTPEQWKS | | |
| | TTPPVLDSDGSFFLYSRLTVDKSRW | | HRSYSCQVTHEG | | |
| | QQGNVFSCSVMHEALHNHYTQKSL | | STVEKTVAPTEC | | |
| | SLSPG | | s | | |
| PS3B | [sequence omitted] | 1392 | QSVLTQPPSVSA | 1393 | PSMB896 |
| 934 | GFTFSSYAMSWVRQAPGKGLEWVS | | APGQKVTISCSG | | HC2 |
| | AISGGIGSTYYADSVKGRFTISRDNS | | SSSNIGINYVSW | | Construct |
| | KNTLWLQMNSLRAEDTAVYYCAK | | YQQLPGTAPKLL | | ID: |
| | DGVGATPYYFDYWGQGTLVTVSSA | | IYDNNKRPSGIP | | PBD000101 |
| | STKGPSVFPLAPSSKSTSGGTAALGC | | DRFSGSKSGTSA | | 320 |
| | LVKDYFPEPVTVSWNSGALTSGVH | | TLGITGLQTGDE | | |
| | TFPAVLQSSGLYSLSSVVTVPSSSLG | | ADYYCGTWDSS | | |
| | TQTYICNVNHKPSNTKVDKKVEPKS | | LSAVVFGGGTKL | | |
| | CDKTHTCPPCPAPEAAGGPSVFLFPP | | TVLGQPKAAPSV | | |
| | KPKDTLMISRTPEVTCVVVSVSHED | | TLFPPSSEELQAN | | |
| | PEVKFNWYVDGVEVHNAKTKPREE | | KATLVCLISDFY | | |
| | QYNSTYRVVSVLTVLHQDWLNGKE | | PGAVTVAWKAD | | |
| | YKCKVSNKALPAPIEKTISKAKGQP | | SSPVKAGVETTT | | |
| | REPQVYTLPPSREEMTKNQVSLTCL | | PSKQSNNKYAAS | | |
| | VKGFYPSDIAVEWESNGQPENNYK | | SYLSLTPEQWKS | | |
| | TTPPVLDSDGSFFLYSRLTVDKSRW | | HRSYSCQVTHEG | | |
| | QQGNVFSCSVMHEALHNHYTQKSL | | STVEKTVAPTEC | | |
| | SLSPG | | s | | |
| PS3B | [sequence omitted] | 1394 | QSVLTQPPSVSA | 1395 | PSMB897 |
| 933 | GFTFSSYAMSWVRQAPGKGLEWVS | | APGQKVTISCSG | | HC2 |
| | AISGGSGSTYYADSVKGRFTISRDNS | | SSSNIGNNYVSW | | Construct |
| | KNTLYLQMNSLRAEDSAVYYCAKD | | YQQLPGTAPKLL | | ID: |
| | GVGATPYYFDYWGQGTLVTVSSAS | | IYDNNKRPSGIP | | PBD000101 |
| | TKGPSVFPLAPSSKSTSGGTAALGCL | | DRFSGSKSGTSA | | 322 |
| | VKDYFPEPVTVSWNSGALTSGVHTF | | TLGITGLQTGDE | | |
| | PAVLQSSGLYSLSSVVTVPSSSLGTQ | | ADYYCGTWDSS | | |
| | TYICNVNHKPSNTKVDKKVEPKSCD | | LSAYVFGTGTKV | | |
| | KTHTCPPCPAPEAAGGPSVFLFPPKP | | TVLGQPKAAPSV | | |
| | KDTLMISRTPEVTCVVVSVSHEDPE | | TLFPPSSEELQAN | | |
| | VKFNWYVDGVEVHNAKTKPREEQ | | KATLVCLISDFY | | |
| | YNSTYRVVSVLTVLHQDWLNGKEY | | PGAVTVAWKAD | | |
| | KCKVSNKALPAPIEKTISKAKGQPR | | SSPVKAGVETTT | | |
| | EPQVYTLPPSREEMTKNQVSLTCLV | | PSKQSNNKYAAS | | |
| | KGFYPSDIAVEWESNGQPENNYKTT | | SYLSLTPEQWKS | | |
| | PPVLDSDGSFFLYSRLTVDKSRWQQ | | HRSYSCQVTHEG | | |
| | GNVFSCSVMHEALHNHYTQKSLSL | | STVEKTVAPTEC | | |
| | SPG | | S | | |
| PS3B | [sequence omitted] | 1396 | QSVLTQPPSVSA | 1397 | PSMB898 |
| 935 | GFTFSSYAMSWVRQAPGKGLEWVS | | APGQKVTISCSG | | HC2 |
| | AISGGSGSTYYADSVKGRFTISRDNS | | SSSNIGINYVSW | | Construct |
| | KNTLYLQMNSLRAEDSAVYYCAKD | | YQQLPGTAPKLL | | ID: |
| | GVGATPYYFDYWGQGTLVTVSSAS | | IYDNNKRPSGIP | | PBD000101 |
| | TKGPSVFPLAPSSKSTSGGTAALGCL | | DRFSGSKSGTSA | | 322 |
| | VKDYFPEPVTVSWNSGALTSGVHTF | | TLGITGLQTGDE | | |
| | PAVLQSSGLYSLSSVVTVPSSSLGTQ | | ADYYCGTWDSS | | |
| | TYICNVNHKPSNTKVDKKVEPKSCD | | LSAVVFGGGTKL | | |
| | KTHTCPPCPAPEAAGGPSVFLFPPKP | | TVLGQPKAAPSV | | |
| | KDTLMISRTPEVTCVVVSVSHEDPE | | TLFPPSSEELQAN | | |
| | VKFNWYVDGVEVHNAKTKPREEQ | | KATLVCLISDFY | | |
| | YNSTYRVVSVLTVLHQDWLNGKEY | | PGAVTVAWKAD | | |
| | KCKVSNKALPAPIEKTISKAKGQPR | | SSPVKAGVETTT | | |
| | EPQVYTLPPSREEMTKNQVSLTCLV | | PSKQSNNKYAAS | | |
| | KGFYPSDIAVEWESNGQPENNYKTT | | SYLSLTPEQWKS | | |
| | PPVLDSDGSFFLYSRLTVDKSRWQQ | | HRSYSCQVTHEG | | |
| | GNVFSCSVMHEALHNHYTQKSLSL | | STVEKTVAPTEC | | |
| | SPG | | s | | |
| PS3B | EVQLVESGGGLVQPGGSLRLSCTAS | 1398 | QSVLTQPPSVSA | 1399 | PSMB899 |
| 925 | GFIFSSYAMSWVRQAPGKGLEWVS | | APGQKVTISCSG | | HC2 |
| | AISGGYGAPYYADTVKGRFTISRDN | | SSSNIGNNYVSW | | Construct |
| | SKNTLYLQMNSLRAEDTAVYYCAK | | YQQLPGTAPKLL | | ID: |
| | DGVGATPYYFDDWGQGILVTVSSA | | IFDNNKRPSGIPD | | PBD000101 |
| | STKGPSVFPLAPSSKSTSGGTAALGC | | RFSGSKSGTSAT | | 324 |
| | LVKDYFPEPVTVSWNSGALTSGVH | | LGITGLQTGDEA | | |
| | TFPAVLQSSGLYSLSSVVTVPSSSLG | | DYYCGTWDSSL | | |
| | TQTYICNVNHKPSNTKVDKKVEPKS | | SAYVFGTGTKVT | | |
| | CDKTHTCPPCPAPEAAGGPSVFLFPP | | VLGQPKAAPSVT | | |
| | KPKDTLMISRTPEVTCVVVSVSHED | | LFPPSSEELQAN | | |
| | PEVKFNWYVDGVEVHNAKTKPREE | | KATLVCLISDFY | | |
| | QYNSTYRVVSVLTVLHQDWLNGKE | | PGAVTVAWKAD | | |
| | YKCKVSNKALPAPIEKTISKAKGQP | | SSPVKAGVETTT | | |
| | REPQVYTLPPSREEMTKNQVSLTCL | | PSKQSNNKYAAS | | |
| | VKGFYPSDIAVEWESNGQPENNYK | | SYLSLTPEQWKS | | |
| | TTPPVLDSDGSFFLYSRLTVDKSRW | | HRSYSCQVTHEG | | |
| | QQGNVFSCSVMHEALHNHYTQKSL | | STVEKTVAPTEC | | |
| | SLSPG | | S | | |
| PS3B | [sequence omitted] | 1400 | QSVLTQPPSVSA | 1401 | PSMB946 |
| 1352 | GFTFSSYAMSWVRQAPGKGLEWVS | | APGQKVTISCSG | | HC2 |
| | AISGGIGSTYYADSVKGRFTISRDNS | | SSSNIGNNYVSW | | Construct |
| | KNTLWLQMNSLRAEDTAVYYCAK | | YQQLPGTAPKLL | | ID: |
| | DGVGATPYYFDYWGQGTLVTVSSA | | IYDNNKRPSGIP | | PBD000108 |
| | STKGPSVFPLAPSSKSTSGGTAALGC | | DRFSGSKSGTSA | | 502 |
| | LVKDYFPEPVTVSWNSGALTSGVH | | TLGITGLQTGDE | | |
| | TFPAVLQSSGLYSLSSVVTVPSSSLG | | ADYYCGTWDSS | | |
| | TQTYICNVNHKPSNTKVDKKVEPKS | | LSAYVFGTGTKV | | |
| | CDKTHTCPPCPAPEAAGGPSVFLFPP | | TVLGQPKAAPSV | | |
| | KPKDTLMISRTPEVTCVVVSVSHED | | TLFPPSSEELQAN | | |
| | PEVKFNWYVDGVEVHNAKTKPREE | | KATLVCLISDFY | | |
| | QYNSTYRVVSVLTVLHQDWLNGKE | | PGAVTVAWKAD | | |
| | YKCKVSNKALPAPIEKTISKAKGQP | | SSPVKAGVETTT | | |
| | REPQVYTLPPSREEMTKNQVSLTCL | | PSKQSNNKYAAS | | |
| | VKGFYPSDIAVEWESNGQPENNYK | | SYLSLTPEQWKS | | |
| | TTPPVLDSDGSFFLYSRLTVDKSRW | | HRSYSCQVTHEG | | |
| | QQGNVFSCSVMHEALHNHYTQKSL | | STVEKTVAPTEC | | |
| | SLSPGK | | s | | |
| PS3B | [sequence omitted] | 1402 | QSVLTQPPSVSA | 1403 | PSMB847 |
| 1353 | GFTFSSYAMSWVRQAPGKGLEWVS | | APGQKVTISCSG | | HC2 |
| | AISGGIGSTYYADSVKGRFTISRDNS | | SSSNIGINYVSW | | Construct |
| | KNTLWLQMNSLRAEDTAVYYCAK | | YQQLPGTAPKLL | | ID: |
| | DGVGATPYYFDYWGQGTLVTVSSA | | IYDNNKRPSGIP | | PBD000108 |
| | STKGPSVFPLAPSSKSTSGGTAALGC | | DRFSGSKSGTSA | | 503 |
| | LVKDYFPEPVTVSWNSGALTSGVH | | TLGITGLQTGDE | | |
| | TFPAVLQSSGLYSLSSVVTVPSSSLG | | ADYYCGTWDSS | | |
| | TQTYICNVNHKPSNTKVDKKVEPKS | | LSAVVFGGGTKL | | |
| | CDKTHTCPPCPAPEAAGGPSVFLFPP | | TVLGQPKAAPSV | | |
| | KPKDTLMISRTPEVTCVVVSVSHED | | TLFPPSSEELQAN | | |
| | PEVKFNWYVDGVEVHNAKTKPREE | | KATLVCLISDFY | | |
| | QYNSTYRVVSVLTVLHQDWLNGKE | | PGAVTVAWKAD | | |
| | YKCKVSNKALPAPIEKTISKAKGQP | | SSPVKAGVETTT | | |
| | REPQVYTLPPSREEMTKNQVSLTCL | | PSKQSNNKYAAS | | |
| | VKGFYPSDIAVEWESNGQPENNYK | | SYLSLTPEQWKS | | |
| | TTPPVLDSDGSFFLYSRLTVDKSRW | | HRSYSCQVTHEG | | |
| | QQGNVFSCSVMHEALHNHYTQKSL | | STVEKTVAPTEC | | |
| | SLSPGK | | s | | |
| PS3B | [sequence omitted] | 1404 | QSVLTQPPSVSA | 1405 | PSMB848 |
| 1354 | GFTFSSYAMSWVRQAPGKGLEWVS | | APGQKVTISCSG | | HC2 |
| | AISGGSGSTYYADSVKGRFTISRDNS | | SSSNIGNNYVSW | | Construct |
| | KNTLYLQMNSLRAEDSAVYYCAKD | | YQQLPGTAPKLL | | ID: |
| | GVGATPYYFDYWGQGTLVTVSSAS | | IYDNNKRPSGIP | | PBD000108 |
| | TKGPSVFPLAPSSKSTSGGTAALGCL | | DRFSGSKSGTSA | | 504 |
| | VKDYFPEPVTVSWNSGALTSGVHTF | | TLGITGLQTGDE | | |
| | PAVLQSSGLYSLSSVVTVPSSSLGTQ | | ADYYCGTWDSS | | |
| | TYICNVNHKPSNTKVDKKVEPKSCD | | LSAYVFGTGTKV | | |
| | KTHTCPPCPAPEAAGGPSVFLFPPKP | | TVLGQPKAAPSV | | |
| | KDTLMISRTPEVTCVVVSVSHEDPE | | TLFPPSSEELQAN | | |
| | VKFNWYVDGVEVHNAKTKPREEQ | | KATLVCLISDFY | | |
| | YNSTYRVVSVLTVLHQDWLNGKEY | | PGAVTVAWKAD | | |
| | KCKVSNKALPAPIEKTISKAKGQPR | | SSPVKAGVETTT | | |
| | EPQVYTLPPSREEMTKNQVSLTCLV | | PSKQSNNKYAAS | | |
| | KGFYPSDIAVEWESNGQPENNYKTT | | SYLSLTPEQWKS | | |
| | PPVLDSDGSFFLYSRLTVDKSRWQQ | | HRSYSCQVTHEG | | |
| | GNVFSCSVMHEALHNHYTQKSLSL | | STVEKTVAPTEC | | |
| | SPGK | | S | | |
| PS3B | [sequence omitted] | 1406 | QSVLTQPPSVSA | 1407 | PSMB849 |
| 1355 | GFTFSSYAMSWVRQAPGKGLEWVS | | APGQKVTISCSG | | HC2 |
| | AISGGSGSTYYADSVKGRFTISRDNS | | SSSNIGINYVSW | | Construct |
| | KNTLYLQMNSLRAEDSAVYYCAKD | | YQQLPGTAPKLL | | ID: |
| | GVGATPYYFDYWGQGTLVTVSSAS | | IYDNNKRPSGIP | | PBD000108 |
| | TKGPSVFPLAPSSKSTSGGTAALGCL | | DRFSGSKSGTSA | | 505 |
| | VKDYFPEPVTVSWNSGALTSGVHTF | | TLGITGLQTGDE | | |
| | PAVLQSSGLYSLSSVVTVPSSSLGTQ | | ADYYCGTWDSS | | |
| | TYICNVNHKPSNTKVDKKVEPKSCD | | LSAVVFGGGTKL | | |
| | KTHTCPPCPAPEAAGGPSVFLFPPKP | | TVLGQPKAAPSV | | |
| | KDTLMISRTPEVTCVVVSVSHEDPE | | TLFPPSSEELQAN | | |
| | VKFNWYVDGVEVHNAKTKPREEQ | | KATLVCLISDFY | | |
| | YNSTYRVVSVLTVLHQDWLNGKEY | | PGAVTVAWKAD | | |
| | KCKVSNKALPAPIEKTISKAKGQPR | | SSPVKAGVETTT | | |
| | EPQVYTLPPSREEMTKNQVSLTCLV | | PSKQSNNKYAAS | | |
| | KGFYPSDIAVEWESNGQPENNYKTT | | SYLSLTPEQWKS | | |
| | PPVLDSDGSFFLYSRLTVDKSRWQQ | | HRSYSCQVTHEG | | |
| | GNVFSCSVMHEALHNHYTQKSLSL | | STVEKTVAPTEC | | |
| | SPGK | | s | | |
| PS3B | [sequence omitted] | 1408 | QSVLTQPPSVSA | 1409 | PSMB946 |
| 1356 | GFTFSSYAMSWVRQAPGKGLEWVS | | APGQKVTISCSG | | HC2 |
| | AISGGIGSTYYADSVKGRFTISRDNS | | SSSNIGNNYVSW | | Construct |
| | KNTLWLQMNSLRAEDTAVYYCAK | | YQQLPGTAPKLL | | ID: |
| | DGVGATPYYFDYWGQGTLVTVSSA | | IYDNNKRPSGIP | | PBD000108 |
| | STKGPSVFPLAPSSKSTSGGTAALGC | | DRFSGSKSGTSA | | 502 |
| | LVKDYFPEPVTVSWNSGALTSGVH | | TLGITGLQTGDE | | |
| | TFPAVLQSSGLYSLSSVVTVPSSSLG | | ADYYCGTWDSS | | |
| | TQTYICNVNHKPSNTKVDKKVEPKS | | LSAYVFGTGTKV | | |
| | CDKTHTCPPCPAPEAAGGPSVFLFPP | | TVLGQPKAAPSV | | |
| | KPKDTLMISRTPEVTCVVVSVSHED | | TLFPPSSEELQAN | | |
| | PEVKFNWYVDGVEVHNAKTKPREE | | KATLVCLISDFY | | |
| | QYNSTYRVVSVLTVLHQDWLNGKE | | PGAVTVAWKAD | | |
| | YKCKVSNKALPAPIEKTISKAKGQP | | SSPVKAGVETTT | | |
| | REPQVYTLPPSREEMTKNQVSLTCL | | PSKQSNNKYAAS | | |
| | VKGFYPSDIAVEWESNGQPENNYK | | SYLSLTPEQWKS | | |
| | TTPPVLDSDGSFFLYSRLTVDKSRW | | HRSYSCQVTHEG | | |
| | QQGNVFSCSVMHEALHNHYTQKSL | | STVEKTVAPTEC | | |
| | SLSPGK | | S | | |
| PS3B | [sequence omitted] | 1410 | QSVLTQPPSVSA | 1411 | PSMB847 |
| 1357 | GFTFSSYAMSWVRQAPGKGLEWVS | | APGQKVTISCSG | | HC2 |
| | AISGGIGSTYYADSVKGRFTISRDNS | | SSSNIGINYVSW | | Construct |
| | KNTLWLQMNSLRAEDTAVYYCAK | | YQQLPGTAPKLL | | ID: |
| | DGVGATPYYFDYWGQGTLVTVSSA | | IYDNNKRPSGIP | | PBD000108 |
| | STKGPSVFPLAPSSKSTSGGTAALGC | | DRFSGSKSGTSA | | 503 |
| | LVKDYFPEPVTVSWNSGALTSGVH | | TLGITGLQTGDE | | |
| | TFPAVLQSSGLYSLSSVVTVPSSSLG | | ADYYCGTWDSS | | |
| | TQTYICNVNHKPSNTKVDKKVEPKS | | LSAVVFGGGTKL | | |
| | CDKTHTCPPCPAPEAAGGPSVFLFPP | | TVLGQPKAAPSV | | |
| | KPKDTLMISRTPEVTCVVVSVSHED | | TLFPPSSEELQAN | | |
| | PEVKFNWYVDGVEVHNAKTKPREE | | KATLVCLISDFY | | |
| | QYNSTYRVVSVLTVLHQDWLNGKE | | PGAVTVAWKAD | | |
| | YKCKVSNKALPAPIEKTISKAKGQP | | SSPVKAGVETTT | | |
| | REPQVYTLPPSREEMTKNQVSLTCL | | PSKQSNNKYAAS | | |
| | VKGFYPSDIAVEWESNGQPENNYK | | SYLSLTPEQWKS | | |
| | TTPPVLDSDGSFFLYSRLTVDKSRW | | HRSYSCQVTHEG | | |
| | QQGNVFSCSVMHEALHNHYTQKSL | | STVEKTVAPTEC | | |
| | SLSPGK | | s | | |
| PS3B | [sequence omitted] | 1412 | QSVLTQPPSVSA | 1413 | PSMB849 |
| 1358 | GFTFSSYAMSWVRQAPGKGLEWVS | | APGQKVTISCSG | | HC2 |
| | AISGGSGSTYYADSVKGRFTISRDNS | | SSSNIGINYVSW | | Construct |
| | KNTLYLQMNSLRAEDSAVYYCAKD | | YQQLPGTAPKLL | | ID: |
| | GVGATPYYFDYWGQGTLVTVSSAS | | IYDNNKRPSGIP | | PBD000108 |
| | TKGPSVFPLAPSSKSTSGGTAALGCL | | DRFSGSKSGTSA | | 505 |
| | VKDYFPEPVTVSWNSGALTSGVHTF | | TLGITGLQTGDE | | |
| | PAVLQSSGLYSLSSVVTVPSSSLGTQ | | ADYYCGTWDSS | | |
| | TYICNVNHKPSNTKVDKKVEPKSCD | | LSAVVFGGGTKL | | |
| | KTHTCPPCPAPEAAGGPSVFLFPPKP | | TVLGQPKAAPSV | | |
| | KDTLMISRTPEVTCVVVSVSHEDPE | | TLFPPSSEELQAN | | |
| | VKFNWYVDGVEVHNAKTKPREEQ | | KATLVCLISDFY | | |
| | YNSTYRVVSVLTVLHQDWLNGKEY | | PGAVTVAWKAD | | |
| | KCKVSNKALPAPIEKTISKAKGQPR | | SSPVKAGVETTT | | |
| | EPQVYTLPPSREEMTKNQVSLTCLV | | PSKQSNNKYAAS | | |
| | KGFYPSDIAVEWESNGQPENNYKTT | | SYLSLTPEQWKS | | |
| | PPVLDSDGSFFLYSRLTVDKSRWQQ | | HRSYSCQVTHEG | | |
| | GNVFSCSVMHEALHNHYTQKSLSL | | STVEKTVAPTEC | | |
| | SPGK | | S | | |
| PSMB | [sequence omitted] | 1414 | QSVLTQPPSVSA | 1415 | PSMB848 |
| 937 | GFTFSSYAMSWVRQAPGKGLEWVS | | APGQKVTISCSG | | HC2 |
| | AISGGSGSTYYADSVKGRFTISRDNS | | SSSNIGNNYVSW | | Construct |
| | KNTLYLQMNSLRAEDSAVYYCAKD | | YQQLPGTAPKLL | | ID: |
| | GVGATPYYFDYWGQGTLVTVSSAS | | IYDNNKRPSGIP | | PBD000101 |
| | TKGPSVFPLAPSSKSTSGGTAALGCL | | DRFSGSKSGTSA | | 322 |
| | VKDYFPEPVTVSWNSGALTSGVHTF | | TLGITGLQTGDE | | |
| | PAVLQSSGLYSLSSVVTVPSSSLGTQ | | ADYYCGTWDSS | | |
| | TYICNVNHKPSNTKVDKKVEPKSCD | | LSAYVFGTGTKV | | |
| | KTHTCPPCPAPEAAGGPSVFLFPPKP | | TVLGQPKAAPSV | | |
| | KDTLMISRTPEVTCVVVSVSHEDPE | | TLFPPSSEELQAN | | |
| | VKFNWYVDGVEVHNAKTKPREEQ | | KATLVCLISDFY | | |
| | YNSTYRVVSVLTVLHQDWLNGKEY | | PGAVTVAWKAD | | |
| | KCKVSNKALPAPIEKTISKAKGQPR | | SSPVKAGVETTT | | |
| | EPQVYTLPPSREEMTKNQVSLTCLV | | PSKQSNNKYAAS | | |
| | KGFYPSDIAVEWESNGQPENNYKTT | | SYLSLTPEQWKS | | |
| | PPVLDSDGSFFLYSRLTVDKSRWQQ | | HRSYSCQVTHEG | | |
| | GNVFSCSVMHEALHNHYTQKSLSL | | STVEKTVAPTEC | | |
| | SPG | | S | | |

### Example 8.2: Analytical Characterization of Bispecific Anti-PSMAxCD3 Antibodies

[1114] The protein concentration for each purified bispecific Ab was determined by measuring the absorbance at 280 nm on a NANODROP1000 spectrophotometer or Trinean DROPSENSE96 multichannel spectrophotometer and calculated using the extinction coefficient based on the amino acid sequence. SE HPLC of the purified antibodies was performed by running samples on a TOSOH TSKgel BioAssist G3SWxl column, in 0.2 M Na Phosphate pH 6.8 at 1 mL/min on a Waters Alliance HPLC for 20 min. The column effluent was monitored by absorbance at 280 nm. Anti-PSMA-CD3 bispecific antibodies were further analyzed by Intact Mass Analysis to determine appropriate formation of heterodimers.

### Example 9: Epitope Mapping of Anti-PSMAxCD3 Antibodies

### Example 9.1: HDX-MS Epitope Mapping

[1115] The epitope of two anti-PSMA/CD3 bispecific antibodies PS3B1352 and PS3B1353 were determined by hydrogen-deuterium exchange mass spectrometry (HDX-MS). See FIG. 14. Human PSMA antigen was used for epitope mapping experiment. See FIG. 15.

[1116] On-Exchange Experiment for HDX-MS. Briefly, on-exchange reaction was initiated by mixing 10 μL of 6.0 μM human PSMA with or without 7.3 μM antibody and 30 μL of H₂O or a deuterated buffer (20 mM MES, pH 6.4, 150 mM NaCl in 95% D₂O or 20 mM Tris, pH 8.4, 150 mM NaCl in 95% D₂O). The reaction mixture was incubated for 15, 50, 150, 500, or 1,500 s at 23° C. and quenched at the different time points described by the addition of chilled 40 μL of 8 M urea, 1 M TCEP, pH 3.0. The quenched solutions were analyzed immediately.

[1117] General Procedure for HDX-MS Data Acquisition. HDX-MS sample preparation was performed with automated HDx system (LEAP Technologies, Morrisville, N.C.). The columns and pump were; protease, protease type XIII (protease from Aspergillus saitoi, type XIII)/pepsin column (w/w, 1:1; 2.1×30 mm) (NovaBioAssays Inc., Woburn, Mass.); trap, ACQUITY UPLC BEH C18 VanGuard Pre-column (2.1×5 mm) (Waters, Milford, Mass.), analytical, Accucore C18 (2.1×100 mm) (Thermo Fisher Scientific, Waltham, Mass.); and LC pump, VH-P10-A (Thermo Fisher Scientific). The loading pump (from the protease column to the trap column) was set at 600 μL/min with 99% water, 1% acetonitrile, 0.1% formic acid. The gradient pump (from the trap column to the analytical column) was set from 8% to 28% acetonitrile in 0.1% aqueous formic acid in 20 min at 100 μL/min.

[1118] MS Data Acquisition. Mass spectrometric analyses were carried out using an LTQ™ Orbitrap Fusion Lumos mass spectrometer (Thermo Fisher Scientific) with the capillary temperature at 275° C., resolution 150,000, and mass range (m/z) 300-2,000.

[1119] HDX-MS Data Extraction. BioPharma Finder 2.0 (Thermo Fisher Scientific) was used for the peptide identification of non-deuterated samples prior to the HDX experiments. HDExaminer version 2.4 (Sierra Analytics, Modesto, Calif.) was used to extract centroid values from the MS raw data files for the HDX experiments.

### Example 10: Characterization of Bispecific Anti-PSMAxCD3 Antibodies

### Example 10.1: Binding Affinity of Bispecific Anti-PSMAxCD3 Antibodies to Human PSMA

[1120] The binding affinity of anti-PSMA to the recombinant human, cynomolgus or mouse PSMA was determined by surface plasmon resonance (SPR) using a Biacore 8K instrument\. The antibodies were captured on a goat anti-Fc antibody-modified C1 chip and titrated with 3-fold serial dilutions of PSMA antigen spanning concentrations of 100 nM to 11.1 nM. The association and dissociation were monitored for 3 and 15 minutes, respectively, using a flow rate of 50 μL/min. Raw binding data was referenced by subtracting the analyte binding signals from blanks and analyzed using a 1:1 Langmuir binding model using the Biacore Insight evaluation software to obtain the kinetics which were used to calculate the binding affinity. Kd data are summarized in Table 64. The anti-PSMA were captured using an anti-human Fc antibody and the antigens were injected in solution.

TABLE 64
Affinities (KD) for the interaction of anti-PSMA × CD3
bispecific antibodies with human PSMA as obtained by
the BIACORE (SPR) method.

| Name | KD (M) |
|---|---|
| PS3B917 | ≤2.33E−11 |
| PS3B918 | poor fit |
| PS3B913 | ≤2.40E−10 |
| PS3B915 | 1.89E−09 |
| PS3B914 | Low/No binding |
| PS3B916 | 1.75E−09 |
| PS3B919 | 8.23E−10 |
| PS3B921 | ≤8.64E−11 |
| PS3B920 | 1.35E−09 |
| PS3B922 | 4.10E−10 |
| PS3B912 | 1.74E−10 |
| PS3B930 | ≤2.26E−11 |
| PS3B931 | poor fit |
| PS3B926 | ≤2.53E−10 |
| PS3B928 | 2.37E−09 |
| PS3B927 | 1.11E−09 |
| PS3B929 | 1.83E−09 |
| PS3B932 | 7.87E−10 |
| PS3B934 | ≤8.73E−11 |
| PS3B933 | 1.44E−09 |
| PS3B935 | 4.54E−10 |
| PS3B925 | 1.69E−10 |

[1121] The binding affinity of anti-PSMA antibodies to the recombinant human PSMA was determined by surface plasmon resonance (SPR) using a BIACORE 8K instrument (ELN PSMA-00702). The antibodies were captured on a goat anti-Fc antibody-modified C1 chip and titrated with 3-fold serial dilutions of PSMA antigen spanning concentrations of 1 nM to 100 nM human PSMA. The association and dissociation were monitored for 3 and 30 minutes, respectively, using a flow rate of 50 μL/min. Raw binding data was referenced by subtracting the analyte binding signals from blanks and analyzed using a 1:1 Langmuir binding model by the Biacore Insight evaluation software to obtain the kinetics which were used to calculate the binding affinity. The kinetic parameter of binding of selected antibodies are shown in Table 65. The anti-PSMA were captured using an anti-human Fc antibody and the antigens were injected in solution.

TABLE 65
Affinities (KD) for the interaction of anti-PSMA antibodies with
Human PSMA as obtained by the Biacore (SPR) method.

| | ka (1/Ms) | kd (1/s) | KD (M) |
|---|---|---|---|
| PSMB1045 | 2.09E+05 | 6.98E−05 | 3.33E−10 |
| PSMB1049 | 1.07E+05 | 7.02E−05 | 6.57E−10 |
| PSMB1051 | 7.71E+04 | 7.75E−05 | 1.01E−09 |
| PSMB1041 | 2.07E+05 | 4.35E−04 | 2.11E−09 |
| PSMB1068 | 1.51E+05 | 1.68E−04 | 1.11E−09 |
| PSMB1052 | 1.96E+05 | 3.15E−04 | 1.61E−09 |
| PSMB1069 | 1.39E+05 | 1.97E−04 | 1.42E−09 |
| PSMB1047 | 6.94E+05 | 1.75E−03 | 2.52E−09 |
| PSMB1075 | 5.26E+05 | 4.92E−04 | 9.36E−10 |
| PSMB1060 | 1.17E+05 | 1.19E−04 | 1.02E−09 |

[1122] The binding affinity of anti-PSMA to the recombinant human or cynomolgus PSMA was determined by surface plasmon resonance (SPR) using a Biacore 8K instrument (ELN PSMA-00721). The antibodies were captured on a goat anti-Fc antibody-modified C1 chip and titrated with 3-fold serial dilutions of PSMA antigen spanning concentrations of 100 nM to 3.7 nM (huma PSMA) or 100 nM to 3.7 nM, or 22.2-600 nM for cyno PSMA. The association and dissociation were monitored for 3 and 60 minutes, respectively, using a flow rate of 50 μL/min. Raw binding data was referenced by subtracting the analyte binding signals from blanks and analyzed using a 1:1 Langmuir binding model by the Biacore Insight evaluation software to obtain the kinetics which were used to calculate the binding affinity. The kinetic parameter of binding of selected antibodies are shown in Table 66. The anti-PSMA were captured using an anti-human Fc antibody and the antigens were injected in solution.

TABLE 66
Affinities (KD)* for the interaction of anti-PSMA antibodies with
Human, cyno or Mouse PSMA as obtained by the Biacore (SPR) method.

| | | Avg. ka | 95% | Avg. kd | 95% | Avg. KD | 95% |
|---|---|---|---|---|---|---|---|
| Protein name | Antigen | (1/Ms) | CI | (1/s) | CI | (M) | CI |
| PS3B1391.002 | cy PSMA | 1.57E+05 | 5.77E+04 | 1.96E−05 | 6.59E−06 | 1.26E−10 | 3.72E−11 |
| PS3B1391.002 | hu PSMA | 4.80E+05 | | 4.80E−05 | | 1.00E−10 | |
| PS3B1508.003 | cy PSMA | 1.46E+06 | | 3.23E−03 | | 2.20E−09 | |
| PS3B1508.003 | hu PSMA | 2.32E+05 | | 8.89E−05 | | 3.82E−10 | |
| PS3B1396.002 | cy PSMA | 5.87E+05 | | 1.90E−03 | | 5.07E−09 | |
| PS3B1396.002 | hu PSMA | 2.24E+05 | | 8.82E−05 | | 3.95E−10 | |
| PS3B1505.001 | cy PSMA | 4.29E+05 | | 1.24E−03 | | 5.01E−09 | |
| PS3B1505.001 | hu PSMA | 2.32E+05 | | 9.10E−05 | | 3.93E−10 | |

*Data in row 1 is an average of 3. Data in other rows an average of 2.

### Example 10.2: Thermal Stability of Bispecific Anti-PSMAxCD3 Antibodies

[1123] The thermal stability (conformational stability information including, Tm and Tagg) of anti-PSMAxCD3 antibodies was determined by nanoDSF method using a Prometheus instrument as described above. Briefly, measurements were made by loading sample into 24 well capillary from a 384 well sample plate. Duplicate runs were performed. The thermal scans span from 20° C. to 95° C. at a rate of 1.0° C./minute. The data was processed to obtain integrated data and first derivation analysis for 330 nm, 350 nm, Ratio 330/350, and scatter data from which thermal transitions, onset of unfolding, Tm and Tagg were obtained and summarized in Table 67.

TABLE 67
Thermal stability data for bispecific anti-PSMA × CD3
antibodies as obtained using a nanoDSF instrument.

| Name | Tage | Tₘl | Tₘ2 | Tₘ3 |
|---|---|---|---|---|
| PS3B917 | 68.2° C. | 63.5° C. | 68.8° C. | |
| PS3B918 | 67.8° C. | 63.4° C. | 68.2° C. | |
| PS3B913 | 75.1° C. | 63.4° C. | 76.3° C. | |
| PS3B915 | 69.2° C. | 63.5° C. | | |
| PS3B914 | 64.5° C. | 61.9° C. | 67.0° C. | 75.8° C. |
| PS3B916 | 59.1° C. | 59.9° C. | | |
| PS3B919 | 81.0° C. | 63.5° C. | 68.3° C. | 85.7° C. |
| PS3B921 | 78.9° C. | 63.5° C. | 80.8° C. | |
| PS3B920 | 82.6° C. | 63.4° C. | 87.5° C. | |
| PS3B922 | 80.5° C. | 63.3° C. | 83.4° C. | |
| PS3B912 | 77.1° C. | 63.6° C. | 78.4° C. | |
| PS3B930 | 72.2° C. | 70.1° C. | | |
| PS3B931 | 72.2° C. | 69.5° C. | | |
| PS3B926 | 75.6° C. | 70.2° C. | 75.6° C. | |
| PS3B928 | 72.2° C. | 69.1° C. | | |
| PS3B927 | 69.1° C. | 66.5° C. | 69.4° C. | |
| PS3B929 | 69.1° C. | 58.0° C. | 68.0° C. | |
| PS3B932 | 82.7° C. | 70.4° C. | 85.8° C. | |
| PS3B934 | 79.3° C. | 70.4° C. | 80.9° C. | |
| PS3B933 | 83.7° C. | 70.0° C. | 87.8° C. | |
| PS3B935 | 81.5° C. | 70.2° C. | 83.7° C. | |
| PS3B925 | 77.4° C. | 70.3° C. | 77.9° C. | |

### Example 10.3: Binding of Bispecific PSMAxCD3 Antibodies on PSMA+ Cells

[1124] Selected bispecific PSMAxCD3 antibodies were assessed for their ability to bind prostate cancer cell lines expressing PSMA.

[1125] 22RV1 and C4-2B cells were plated at 50,000 cells per well in 50 μl of assay medium (RPMI, 10% HI FBS) in V bottom plates. Serial dilutions of antibodies were prepared in assay medium with 50 μl of antibody dilutions added to the plates containing cells. The plates were incubated for 60 min at 37° C. at which time 100 μl of staining buffer (Becton Dickinson Cat #554657) was added to all wells of each plate. The plates were centrifuged at 300×G for 5 minutes and the medium was removed from the wells. 200 μl of staining buffer was added to all wells of each plate. The plates were centrifuged at 300×G for 5 minutes and the medium was removed from the wells. 50 μl of 2 μg/ml AlexaFluor647-labeled goat anti-human Fc was added to all wells of the plates and the plates were incubated for 30 minutes at 4° C. 150 μl of staining buffer was added to all wells of each plate. The plates were centrifuged at 300×G for 5 minutes and the medium was removed from the wells. Two hundred microliters of running buffer (Staining buffer plus 1 mM EDTA, 0.1% pluronic acid was added to all wells of the plates. The plates were centrifuged at 300×G for 5 minutes and the medium was removed from the wells. Thirty microliters running buffer was added to all wells with cells and the plates were analyzed on the IQUE Plus instrument (Sartorius). Briefly, cells were gated on a FCS vs. SSC gate to eliminate cellular debris, then the cell populations were gated on singlet cells. Antibody binding was assessed in the red laser channel Signal (Mab plus secondary antibody) to background (secondary antibody only) ratios were calculated for each plate and the resultant data was plotted vs. bispecific antibody concentration in GeneData Screener using 4 parameter curve fitting to generate EC50 values, summarized in Table 68.

TABLE 68
EC50 values of bispecific PSMA × CD3 antibodies binding to
PSMA-expressing cell lines in flow cytometry assays.

| Name | 22RV1 binding EC50 [M] | C4-2B binding EC50 [M] |
|---|---|---|
| PS3B917 | 7.50E−10 | 1.90E−09 |
| PS3B918 | 6.00E−08 | 6.00E−08 |
| PS3B913 | 3.42E−09 | 4.56E−09 |
| PS3B915 | 6.00E−08 | 6.00E−08 |
| PS3B914 | 6.00E−08 | 6.00E−08 |
| PS3B916 | 6.00E−08 | 6.00E−08 |
| PS3B919 | 2.49E−08 | 2.33E−08 |
| PS3B921 | 4.03E−09 | 6.44E−09 |
| PS3B920 | 6.00E−08 | 6.00E−08 |
| PS3B922 | 3.47E−08 | 4.41E−08 |
| PS3B912 | 5.40E−08 | 3.68E−08 |
| PS3B930 | 1.06E−09 | 3.01E−09 |
| PS3B931 | 6.00E−08 | 6.00E−08 |
| PS3B926 | 2.90E−09 | 4.55E−09 |
| PS3B928 | 6.00E−08 | 6.00E−08 |
| PS3B927 | 6.00E−08 | 6.00E−08 |
| PS3B929 | 5.48E−08 | 6.00E−08 |
| PS3B932 | 4.87E−08 | 6.00E−08 |
| PS3B934 | 4.96E−09 | 1.10E−08 |
| PS3B933 | 6.00E−08 | 6.00E−08 |
| PS3B935 | 3.95E−08 | 8.22E−09 |
| PS3B925 | 2.12E−08 | 1.17E−08 |

[1126] Binding of anti-PSMA/CD3 bispecific on PAN-T cells via Flow. Human PAN-T Cells (Biological Specialty Corporation, Colmar, Pa.) were thawed and transferred to a 15 mL conical with DPBS. The cells were centrifuged 1300 rpm for 5 minutes. DPBS was aspirated and cells were re-suspended in DPBS. The cells were counted using the Vi-cell XR cell viability analyzer and were plated at 100K/well in 100 uL DPBS. The plate was centrifuged 1200 rpm for 3 minutes and washed 2× with DPBS. Cells were stained with Violet Live/Dead stain (Thermo-Fisher) and incubated at RT in the dark for 25 min. The cells were centrifuged and washed 2× with FACS staining buffer (BD Pharmingen). Test antibodies were diluted to a final starting concentration of 1 μM in FACS staining buffer and 3-fold serial dilutions were prepared from the starting concentration for a total of 10 dilution points. The serially diluted test antibodies (100 μL/well) were added to the cells and incubated for 30 min at 37° C. Cells were washed 2× with FACS staining buffer and AlexaFluor 647-conjugated Donkey anti-human secondary antibody (Jackson Immunoresearch) was added and allowed to incubate with the cells for 30 min at 4° C. Cells were washed 2× with FACS staining buffer and re-suspended in 100 μL FACS Buffer. Cells were run on BD Celesta using FACS Diva software and analyzed using FLOWJO. FIG. 16 shows that the PSMA/CD3 bispecific antibodies display differential CD3 cell binding profiles detected by flow cytometry.

[1127] Binding curves demonstrated in Table 69 below and FIG. 17 were generated against the prostate cell line C4-2B at 37° C. in RPMI media plus 10% fetal bovine serum after 1 hr incubation. Molecule concentrations ranged from 500-0 nM over 12-points at 3-fold dilution. Selective binding to PSMA was validated using an isotype control. Values reported in the Table 69 were generated by fitting the data to a four-parameter function for ligand binding generating values for y-min, y-max, EC50, and Hill. EC90 were calculated using the equation EC90=(90−(100−90))\hat{ }(1/Hill)*EC50. All curves exhibited a similar Y-min with an average of 7.1+/−1.3E+4 for all curves. See Table 69. None of the Y-min values deviated significantly from the average value. The average fitted Y-max value was 1.7+/−0.6E+6. Molecule PSMB1069 exhibited a 2-fold higher binding signal from the average. None of the other molecules exhibited a significant difference from the average. These molecules exhibited an average EC50=17+/−12 nM.

TABLE 69
EC50 values of anti-PSMA antibodies binding to PSMA-expressing
cell line C4-2B measured by flow cytometry assays.

| | | | EC50 | EC90 |
|---|---|---|---|---|
| Molecule | Y-min | Y-max | (nM) | (nM) |
| PSMB1041 | 7.2E+04 | 1.1E+06 | 16 | 59 |
| PSMB1045 | 5.3E+04 | 1.8E+06 | 7 | 248 |
| PSMB1047 | 7.9E+04 | 1.6E+06 | 22 | 71 |
| PSMB1049 | 8.4E+04 | 1.5E+06 | 5 | 40 |
| PSMB1051 | 6.7E+04 | 1.5E+06 | 10 | 76 |
| PSMB1052 | 6.8E+04 | 1.5E+06 | 13 | 100 |
| PSMB1060 | 8.6E+04 | 1.6E+06 | 11 | 59 |
| PSMB1068 | 4.8E+04 | 1.9E+06 | 8 | 247 |
| PSMB1069 | 8.7E+04 | 3.3E+06 | 44 | 254 |
| PSMB1075 | 6.6E+04 | 1.3E+06 | 30 | 156 |

[1128] Binding of anti-PSMA variants/CD3 bispecific on T cells via flow cytometry. C4-2B human prostate tumor cells were washed with DPBS and 0.25% trypsin was added to allow cells to detach. Media was added to neutralize trypsin and the cells were transferred to a 15 mL conical with DPBS. The cells were centrifuged 1300 rpm for 5 minutes. DPBS was aspirated and cells were re-suspended in DPBS. The cells were counted using the Vi-cell XR cell viability analyzer and were plated at 100K/well in 100 μL DPBS. The plate was centrifuged 1200 rpm for 3 minutes and washed 2× with DPBS. Cells were stained with Violet Live/Dead stain (Thermo-Fisher) and incubated at RT in the dark for 25 min. The cells were centrifuged and washed 2× with FACS staining buffer (BD Pharmingen). Test antibodies were diluted to a final starting concentration of 100 nM in FACS staining buffer and 3-fold serial dilutions were prepared from the starting concentration for a total of 10 dilution points. The serially diluted test antibodies (100 μL/well) were added to the cells and incubated for 30 min at 37° C. Cells were washed 2× with FACS staining buffer and AlexaFluor 647-conjugated Donkey anti-human secondary antibody (Jackson Immunoresearch) was added and allowed to incubate with the cells for 30 min at 4° C. Cells were washed 2× with FACS staining buffer and re-suspended in 100 μL FACS Buffer. Cells were run on BD CELESTA using FACS Diva software and analyzed using FLOWJO. FIG. 18 shows that PSMA/CD3 bispecific antibodies display similar PSMA cell binding profiles detected by flow cytometry.

### Example 10.4: Internalization of PSMA

[1129] C4-2B human prostate tumor cells were washed with DPBS and 0.25% trypsin was added to allow cells to detach. Media was added to neutralize trypsin and the cells were transferred to a 15 mL conical with DPBS. The cells were centrifuged 1300 rpm for 5 minutes. DPBS was aspirated and cells were re-suspended in DPBS. The cells were counted using the Vi-cell XR cell viability analyzer and were plated at 40K/well in 50 μL Phenol Red-Free PRMI+10% HI FBS. The PSMA/CD3 bispecific or control antibodies were incubated with IncuCyte® Human Fab-fluor-pH Red Antibody labeling dye for 15 minutes then 50 μL of conjugated PSMA/CD3:Fab-fluor-pH Red complex was added to the wells containing C4-2B cells. The plates were placed in an IncuCyte S3® (Essen) at 37° C. with 5% CO2 for 24 hours. The Ab:Fab-fluor complex that is internalized by the target cells is processed by acidic lysosomes which produces the red fluorogenic signal that is captured and analyzed by the IncuCyte®. FIG. 19 shows that PSMA/CD3 bispecific antibodies internalize but at a lesser rate than the transferrin receptor.

### Example 10.5: T-Cell Mediated Killing of Bispecific PSMAxCD3 Antibodies on PSMA+ Cells Via Flow Cytometry

[1130] Selected bispecific PSMA×CD3 antibodies were assessed for their ability to mediate T cell mediated killing of prostate cancer cells.

[1131] T cell mediated killing of the PSMA×CD3 bispecific antibodies was measured using an assay that indirectly measures cell killing via flow cytometry. Target cell population are identified base on cell viability Test samples and controls were prepared at 20 nM in assay medium (10% RPMI, 10% HI FCS). Half log serial dilutions for a 11-point titration of compounds in sterile polypropylene plates were prepared. Additional wells were used for controls without compounds, T cells or tumor cell containing wells only in assay medium. C4-2B cells were harvested from the cell culture flasks and cells were resuspended in PBS. Cells were stained with 20 pM CFSE for 10 minutes at room temperature. 25 mL of HI FBS was added to stop the staining reaction and the cells were centrifuged at 300×G for 5 minutes. Cells were diluted to 1×10⁶/ml and then plated as tumor target cells in 50 μL assay medium for 50,000 cells/well into a V-bottom tissue culture treated polystyrene assay plate. 50 μL/well of assay media was added to the control wells that did not receive tumor cells. Human PAN-T cell vials were thawed in a water bath set at 37° C. and washed twice by adding 10 ml assay medium and centrifuging at 400×G for 5 minutes. T cells were resuspended to 1×10⁶/mL in assay medium and 50 μL containing 50,000/well were added to the assay plates containing tumor target cells. 50 μL/well assay media was added to the control wells that did not receive tumor cells. 100 μL/well of serially diluted antibodies were added to the assay plates containing cell mixture of target and effector cells. Plates were incubated at 37° C., 5% CO2 in a humidified cell culture incubator for 72 hours.

[1132] Following the incubation assay plates were centrifuged at 500×G for 5 minutes and medium was removed from the wells. 150 μL DPBS was added to each well and the plates were centrifuged at 500×G for 5 minutes and medium was removed from the wells. The cultures were assessed using flow cytometry on the INTELLICYT IQ Plus for viable tumor cells using near IR live/dead stain. T cell activation was assessed using a brilliant violet-labeled anti-CD25 MAB. Cells were gated in an FSC vs SSC gate to eliminate debris. Tumor cells were identified as CFSE positive cells. T cells were identified as CSFE negative cells. Tumor cell viability was calculated as number of live/dead stain positive tumor cells as a percentage of total CSFE cells. Activated T cells were calculated as the number of CD25 positive cells as a percentage of the total number of the live CFSE negative population. The data for percent dead tumor cells and activated T cells were plotted vs. antibody concentration in Gene Data Screener using 4 parameter curve fitting to generate EC50 values. Table 70 shows EC50 values for T cell activation and tumor cell killing.

TABLE 70
In vitro T cell mediated killing of tumor cells and T cell
activation by bispecific PSMA × CD3 antibodies.

| | Tumor killing | T cell activation |
|---|---|---|
| Name | EC50 [M] | EC50 [M] |
| PS3B917 | 7.31E−12 | 4.48E−12 |
| PS3B918 | 1.00E−08 | 1.00E−08 |
| PS3B913 | 3.11E−10 | 1.55E−10 |
| PS3B915 | 1.00E−08 | 1.00E−08 |
| PS3B914 | 1.00E−08 | 1.00E−08 |
| PS3B916 | 1.00E−08 | 1.00E−08 |
| PS3B919 | 2.10E−10 | 1.87E−10 |
| PS3B921 | 3.11E−11 | 2.11E−11 |
| PS3B920 | 3.20E−09 | 1.77E−09 |
| PS3B922 | 7.79E−11 | 5.85E−11 |
| PS3B912 | 6.51E−11 | 4.73E−11 |
| PS3B930 | 4.83E−12 | 2.40E−12 |
| PS3B931 | 1.00E−08 | 1.00E−08 |
| PS3B926 | 4.78E−11 | 3.45E−11 |
| PS3B928 | 4.81E−10 | 1.84E−10 |
| PS3B927 | 1.00E−08 | 1.00E−08 |
| PS3B929 | 1.00E−08 | 1.00E−08 |
| PS3B932 | 6.42E−12 | 1.20E−11 |
| PS3B934 | 7.24E−12 | 4.81E−12 |
| PS3B933 | 4.76E−11 | 6.01E−11 |
| PS3B935 | 7.16E−12 | 6.72E−12 |
| PS3B925 | 7.98E−12 | 4.59E−12 |

### Example 10.6: T-Cell Mediated Killing of Bispecific PSMAxCD3 Antibodies on PSMA+ Cells Via Incucyte

[1133] Select bispecific PSMAxCD3 antibodies were assessed for their ability to mediate T cell mediated killing of prostate cancer cells via IncuCyte®-based cytotoxic assay.

[1134] Healthy donor T cells. PSMA+C4-2B cells stably expressing red nuclear dye were generated to be used in the IncuCyte-based cytotoxicity assay. Frozen vials of healthy donor T cells (Biological Specialty Corporation, Colmar, Pa.) were thawed in a 37° C. water bath, transferred to a 15 mL conical tube, and washed once with 5 mL phenol-red-free RPMI/10% HI FBS medium. The cells were counted using the VIACELL XR cell viability analyzer and the T cells were combined with target cells for a final effector T cell to target cell (E: T) ratio of 3:1. The cell mixture was combined in a 50 mL conical tube. The cell mixture (100 μL/well) was added to a clear 96-well flat-bottom plate. Next, the test antibodies were diluted to a final starting concentration of 60 nM in phenol-red-free RPMI/10% HI FBS medium and 3-fold serial dilutions were prepared from the starting concentration for a total of 11 dilution points. The serially diluted test antibodies (100 μL/well) were added to the combined cells. The plates were placed in either an IncuCyte® Zoom or an IncuCyte S3® (Essen) at 37° C. with 5% CO2 for 120 hours. The target cell lines stably express red nuclear dye which is used to track the kinetics of target cell lysis. Percent cell growth inhibition (%)=(Initial viable target cell number−Current viable target cell number)/Initial viable cell number*100%. Table 71 and FIGS. 20A-20H show cytotoxicity for C4-2B cells with increasing concentrations of anti-PSMA. Isolated PAN-T cells were co-incubated with PSMA+C4-2B cells in the presence of bispecific PSMA/T cell redirection antibodies for 120 hours.

TABLE 71
Bispecific anti-PSMA/anti-T cell redirection antibodies
evaluated in an IncuCyte ®-based cytotoxicity assay.

| | Cytotoxicity (C4-2B cells, 3:1 E:T | | | | |
|---|---|---|---|---|---|
| | ratio, 5 Day) | | | | |
| | 30 | 10 | 3.3 | 1.1 | 0.3 |
| Name | nM | nM | nM | nM | nM |
| PS3B1352 | 79% | 85% | 89% | 88% | 65% |
| PS3B1356 | 88% | 83% | 80% | 55% | No |
| | | | | | lysis |
| PS3B1353 | 92% | 95% | 97% | 98% | 98% |
| PS3B1357 | 91% | 96% | 95% | 96% | 96% |
| PS3B1354 | 84% | 72% | 30% | No | No |
| | | | | lysis | lysis |
| PSMB937 | 41% | No | No | No | No |
| | | lysis | lysis | lysis | lysis |
| PS3B1355 | 94% | 95% | 96% | 97% | 92% |
| PS3B1358 | 88% | 94% | 93% | 90% | 68% |

[1135] Healthy PBMCs. PSMA+C4-2B human prostate tumor cells expressing red nuclear dye were generated to be used in the IncuCyte®-based cytotoxicity assay. Frozen vials of healthy PBMCs (Hemacare, Los Angeles, Calif.) were thawed in a 37° C. water bath, transferred to a 15 mL conical tube, and washed once with 5 mL phenol-red-free RPMI/10% HI FBS medium. The cells were counted using the VIACELL XR cell viability analyzer and the PBMCs were combined with target cells for a final PBMC to target cell (E: T) ratio of 1:1. The cell mixture was combined in a 5 0 mL conical tube. The cell mixture (100 μL/well) was added to a clear 96-well flat-bottom plate. Next, the test antibodies were diluted to a final starting concentration of 30 nM in phenol-red-free RPMI/10% HI FBS medium and 3-fold serial dilutions were prepared from the starting concentration for a total of 11 dilution points. The serially diluted test antibodies (100 μL/well) were added to the combined cells. The plates were placed in either an IncuCyte® Zoom or an IncuCyte S3® (Essen) at 37° C. with 5% CO₂ for 120 hours. The target cell lines stably express red nuclear dye which is used to track the kinetics of target cell lysis. Percent cell growth inhibition (%)=(Initial viable target cell number−Current viable target cell number)/Initial viable cell number*100%. FIG. 21 shows that the PSMA/CD3 bispecific antibodies induce differential C4-2B cytotoxic effects.

### Example 10.7: Evaluating Cytokine Induction by Bispecific Anti-PSMAxCD3 Antibodies

[1136] Select bispecific PSMAxCD3 antibodies were assessed for their ability to induce cytokine release.

[1137] Supernatants collected from the in-vitro cytotoxicity experiment described above were analyzed using the Human Proinflammatory Panel I tissue culture kit (Meso Scale Discovery). Supernatants were thawed on wet ice, spun at 1,500 rpm for 5 minutes at 4° C., then placed on ice. The MULT-SPOT assay plates were pre-washed per the manufacturer's protocol. A standard curve was prepared by serial dilution of the provided calibrators in MSD Diluent 1. The standards and test antibody samples (254/well) were added to the pre-washed plates. Subsequent incubations and washes were all carried out per manufacturer's protocol. Assay plates were read on the SECTOR Imager 6000. IFNγ concentrations were quantified for each PSMAxCD3 bispecific antibody evaluated. FIG. 22 shows functional cytokine release by T cells activated by PSMAxCD3 antibodies.

### Example 10.8: T-Cell Mediated Killing of Bispecific PSMAxCD3 Antibodies on PSMA+ Cells Via xCelligence

[1138] Select bispecific PSMAxCD3 antibodies were assessed for their ability to mediate T cell mediated killing of prostate cancer cells, C4-2B. C4-2B, a prostate cancer cell line expressing ˜150,000 PSMA/cell was used at a 3:1 Effector to Target ratio (E:T), using three PAN-T donors. On day 0 of the experiment, xCelligence plates were blanked with 50 μl of growth media. Plates were then seeded with 20,000 C4-2B (50 μL out of 0.4×10⁶ cells/ml) cells per well. Plates were then incubated on the xCelligence machine overnight. On day 1 of the experiment, three PAN-T donors were used to prepare the E:T ratio by adding 50 μL of 1.2×10⁶ cells/mL (60,000 cells). Then 50 μL of the appropriate bispecific antibodies were added to the appropriate wells for each plate. CD3×null was used as a control. Tumor/target only wells were assigned to be used for normalization in the percent cytolysis calculation. Final antibody concentrations were 50 nM, 10 nM, 2 nM, 0.4 nM, 80 pM and 0 nM. Plates were then placed in the XCELLIGENCE machine and impedance was recorded every 15 minutes for 120 hours. Percent cytolysis was calculated on the RTCA software using the equation % cytolysis=[1−(NCI)/(AvgNCIR)]×100, where NCI is the average cell index of the well and AvgNCIR is the average cell index of the tumor only reference wells. Table 72 summarizes cytolysis for each PSMA×CD3 bispecific molecule over time.

TABLE 72
Summary of % cytolysis at time point 120 hours for all four bispecific
antibodies, for three PAN-T donors, at each dose concentration.

| Donor ID | Name | 50 nM | 10 nM | 2 nM | 0.4 nM | 80 pM |
|---|---|---|---|---|---|---|
| #1 | PS3B1352 | 100% | 100% | 100% | 100% | 77% |
| | PS3B1353 | 100% | 100% | 100% | 100% | 100% |
| | PS3B1356 | 100% | 100% | 100% | 100% | 0% |
| | PS3B1357 | 100% | 100% | 100% | 100% | 100% |
| #2 | PS3B1352 | 100% | 100% | 100% | 100% | 0% |
| | PS3B1353 | 100% | 100% | 100% | 100% | 100% |
| | PS3B1356 | 100% | 100% | 100% | 24% | 0% |
| | PS3B1357 | 100% | 100% | 100% | 100% | 100% |
| #3 | PS3B1352 | 100% | 100% | 100% | 100% | 9% |
| | PS3B1353 | 100% | 100% | 100% | 100% | 100% |
| | PS3B1356 | 100% | 100% | 100% | 100% | 0% |
| | PS3B1357 | 100% | 100% | 100% | 100% | 100% |

[1139] It will be appreciated by those skilled in the art that changes could be made to the embodiments described above without departing from the broad inventive concept thereof. It is understood, therefore, that this invention is not limited to the particular embodiments disclosed, but it is intended to cover modifications within the spirit and scope of the present invention as defined by the present description.

What is claimed:

1. An isolated protein comprising an antigen binding domain that binds to cluster of differentiation 3ε (CD3ε), wherein the antigen binding domain that binds CD3ε comprises:
a. a heavy chain complementarity determining region (HCDR) 1, a HCDR2 and a HCDR3 of a heavy chain variable region (VH) of SEQ ID NO: 55 and a light chain complementarity determining region (LCDR) 1, a LCDR2 and a LCDR3 of a light chain variable region (VL) of SEQ ID NO: 59;
b. the HCDR1, the HCDR2 and the HCDR3 of the VH of SEQ ID NO: 55 and the LCDR1, the LCDR2 and the LCDR3 of the VL of SEQ ID NO: 58;
c. the HCDR1, the HCDR2 and the HCDR3 of the VH of SEQ ID NO: 54 and the LCDR1, the LCDR2 and the LCDR3 of the VL of SEQ ID NO: 56; or
d. the HCDR1, the HCDR2 and the HCDR3 of the VH of SEQ ID NO: 48 and the LCDR1, the LCDR2 and the LCDR3 of the VL of SEQ ID NO: 58;
wherein the amino acid in position N106 of SEQ ID NO: 55, 54, or 48 is optionally substituted with the amino acid selected from the group consisting of A, G, S, F, E, T, R, V, I, Y, L, P, Q, and K,
wherein the residue numbering starts from N-terminus of SEQ ID NO: 55, 54, or 48.

2. The isolated protein of claim 1, comprising the HCDR1, the HCDR2, the HCDR3, the LCDR1, the LCDR2 and the LCDR3 of SEQ ID NOs: 70, 71, 86, 79, 80, and 81, respectively.

3. The isolated protein of claim 1, comprising the HCDR1, the HCDR2, the HCDR3, the LCDR1, the LCDR2 and the LCDR3 of
a. SEQ ID NOs: 70, 71, 72, 79, 80, and 81, respectively;
b. SEQ ID NOs: 70, 71, 87, 79, 80, and 81, respectively; or
c. SEQ ID NOs: 70, 71, 90, 79, 80, and 81, respectively.

4. The isolated protein of claim 1, wherein the antigen binding domain that binds CD3ε is a scFv, a (scFv)2, a Fv, a Fab, a F(ab′)2, a Fd, a dAb or a VHH.

5. The isolated protein of claim 4, wherein the antigen binding domain that binds CD3ε is the Fab.

6. The isolated protein of claim 4, wherein the antigen binding domain that binds CD3ε is the scFv.

7. The isolated protein of claim 6, wherein the scFv comprises, from the N- to C-terminus, a VH, a first linker (L1) and a VL (VH-L1-VL) or the VL, the L1 and the VH (VL-L1-VH).

8. The isolated protein of claim 7, wherein the L1 comprises
a. about 5-50 amino acids;
b. about 5-40 amino acids;
c. about 10-30 amino acids; or
d. about 10-20 amino acids.

9. The isolated protein of claim 7, wherein the L1 comprises an amino acid sequence of SEQ ID NOs: 3-36.

10. The isolated protein of claim 9 wherein the L1 comprises the amino acid sequence of SEQ ID NO: 3.

11. The isolated protein of claim 1, wherein the antigen binding domain that binds CD3ε comprises the VH of SEQ ID NOs: 55, 54, or 48 and the VL of SEQ ID NOs: 59, 58 or 56.

12. The isolated protein of claim 11, wherein the antigen binding domain that binds CD3ε comprises:
a. the VH of SEQ ID NO: 55 and the VL of SEQ ID NO: 59;
b. the VH of SEQ ID NO: 55 and the VL of SEQ ID NO: 58;
c. the VH of SEQ ID NO: 54 and the VL of SEQ ID NO: 56;
d. the VH of SEQ ID NO: 48 and the VL of SEQ ID NO: 58;
e. the VH of SEQ ID NO: 88 and the VL of SEQ ID NO: 58; or
f. the VH of SEQ ID NO: 242 and the VL of SEQ ID NO: 58.

13. The isolated protein of claim 1, wherein the antigen binding domain that binds CD3ε comprises an amino acid sequence selected from the group consisting of SEQ ID NOs: 96, 97, 98, 99, 100, 101, 102, 103, 104, 105, 106, 107, 108, 109, 110, 111, 112, 113, 114, 115, 116, 117, 118, 119, 120, 121, 122, 123, 124, 125, or 126.

14. The isolated protein of claim 1, wherein the isolated protein is a multispecific protein.

15. The isolated protein of claim 14, wherein the multispecific protein is a bispecific protein.

16. The isolated protein of claim 14, wherein the multispecific protein is a trispecific protein.

17. The isolated protein of claim 1, further comprising an immunoglobulin (Ig) constant region or a fragment of the Ig constant region thereof.

18. The isolated protein of claim 17, wherein the fragment of the Ig constant region comprises a Fc region.

19. The isolated protein of claim 17, wherein the fragment of the Ig constant region comprises a CH2 domain.

20. The isolated protein of claim 17, wherein the fragment of the Ig constant region comprises a CH3 domain.

21. The isolated protein of claim 17, wherein the fragment of the Ig constant region comprises a CH2 domain and a CH3 domain.

22. The isolated protein of claim 17, wherein the fragment of the Ig constant region comprises at least portion of a hinge, a CH2 domain and a CH3 domain.

23. The isolated protein of claim 17, wherein the fragment of the Ig constant region comprises a hinge, a CH2 domain and a CH3 domain.

24. The isolated protein of claim 17, wherein the antigen binding domain that binds CD3ε is conjugated to the N-terminus of the Ig constant region or the fragment of the Ig constant region.

25. The isolated protein of claim 17, wherein the antigen binding domain that binds CD3ε is conjugated to the C-terminus of the Ig constant region or the fragment of the Ig constant region.

26. The isolated protein of claim 17, wherein the antigen binding domain that binds CD3ε is conjugated to the Ig constant region or the fragment of the Ig constant region via a second linker (L2).

27. The isolated protein of claim 26, wherein the L2 comprises the amino acid sequence selected from the group consisting of SEQ ID NOs: 3-36.

28. The isolated protein of claim 14, wherein the multispecific protein comprises an antigen binding domain that binds an antigen other than CD3ε.

29. The multispecific antibody of claim 14, wherein the antigen is a tumor associated antigen.

30. The isolated protein of claim 14, wherein the Ig constant region or the fragment of the Ig constant region is an IgG1, an IgG2, an IgG3 or an IgG4 isotype.

31. The isolated protein of claim 1, wherein the Ig constant region or the fragment of the Ig constant region comprises at least one mutation that results in reduced binding of the protein to a Fcγ receptor (FcγR).

32. The isolated protein of claim 31, wherein the at least one mutation that results in reduced binding of the protein to the FcγR is selected from the group consisting of F234A/L235A, L234A/L235A, L234A/L235A/D265S, V234A/G237A/P238S/H268A/V309L/A330S/P331S, F234A/L235A, S228P/F234A/L235A, N297A, V234A/G237A, K214T/E233P/L234V/L235A/G236-deleted/A327G/P331A/D365E/L358M, H268Q/V309L/A330S/P331S, S267E/L328F, L234F/L235E/D265A, L234A/L235A/G237A/P238S/H268A/A330S/P331S, S228P/F234A/L235A/G237A/P238S and S228P/F234A/L235A/G236-deleted/G237A/P238S, wherein residue numbering is according to the EU index.

33. The isolated protein of claim 31, wherein the FcγR is FcγRI, FcγRIIA, FcγRIIB or FcγRIII, or any combination thereof.

34. The isolated protein of claim 14, wherein the protein comprises at least one mutation in a CH3 domain of the Ig constant region.

35. The isolated protein of claim 34, wherein the at least one mutation in the CH3 domain of the Ig constant region is selected from the group consisting of T350V, L351Y, F405A, Y407V, T366Y, T366W, T366L, T366L, F405W, T394W, K392L, T394S, T394W, Y407T, Y407A, T366S/L368A/Y407V, L351Y/F405A/Y407V, T366I/K392M/T394W, F405A/Y407V, T366L/K392M/T394W, T366L/K392L/T394W, L351Y/Y407A, L351Y/Y407V, T366A/K409F, T366V/K409F, T366A/K409F, T350V/L351Y/F405A/Y407V and T350V/T366L/K392L/T394W, wherein residue numbering is according to the EU index.

36. A pharmaceutical composition comprising the isolated protein of claim 1 and a pharmaceutically acceptable carrier.

37. A polynucleotide encoding the isolated protein of claim 1.

38. A vector comprising the polynucleotide of claim 37.

39. A host cell comprising the vector of claim 38.

40. A method of producing the isolated protein of claim 1, comprising culturing the host cell of claim 39 in conditions that the protein is expressed, and recovering the protein produced by the host cell.

41. An anti-idiotypic antibody binding to the isolated protein of claim 1.

42. An isolated protein of claim 1 comprising an amino acid sequence selected from the group consisting of SEQ ID NOs: 127-157.

43. An isolated protein of any one of claims 1-35 comprising an antibody heavy chain of SEQ ID NO: 224 and antibody light chain of SEQ ID NO: 226.

The application's sequence listing, which the Patent Office published only in electronic form, follows.

SEQUENCE LISTING (1510 sequences)

SEQ ID NO: 1 - protein, 207 aa, Homo sapiens
MQSGTHWRVLGLCLLSVGVWGQDGNEEMGGITQTPYKVSISGTTVILTCPQYPGSEILWQHNDKNIGGDEDDKNIGSDEDHLSLKEFSELEQSGYYVCYPRGSKPEDANFYLYLRARVCENCMEMDVMSVATIVIVDICITGGLLLLVYYWSKNRKAKAKPVTRGAGAGGRQRGQNKERPPPVPNPDYEPIRKGQRDLYSGLNQRRI

SEQ ID NO: 2 - protein, 104 aa, Homo sapiens
DGNEEMGGITQTPYKVSISGTTVILTCPQYPGSEILWQHNDKNIGGDEDDKNIGSDEDHLSLKEFSELEQSGYYVCYPRGSKPEDANFYLYLRARVCENCMEMD

SEQ ID NO: 3 - protein, 20 aa, Artificial Sequence
  source: /note="Description of Artificial Sequence: Synthetic peptide"
GGSEGKSSGSGSESKSTGGS

SEQ ID NO: 4 - protein, 8 aa, Artificial Sequence
  source: /note="Description of Artificial Sequence: Synthetic peptide"
GGGSGGGS

SEQ ID NO: 5 - protein, 12 aa, Artificial Sequence
  source: /note="Description of Artificial Sequence: Synthetic peptide"
GGGSGGGSGGGS

SEQ ID NO: 6 - protein, 16 aa, Artificial Sequence
  source: /note="Description of Artificial Sequence: Synthetic peptide"
GGGSGGGSGGGSGGGS

SEQ ID NO: 7 - protein, 20 aa, Artificial Sequence
  source: /note="Description of Artificial Sequence: Synthetic peptide"
GGGSGGGSGGGSGGGSGGGS

SEQ ID NO: 8 - protein, 15 aa, Artificial Sequence
  source: /note="Description of Artificial Sequence: Synthetic peptide"
GGGGSGGGGSGGGGS

SEQ ID NO: 9 - protein, 20 aa, Artificial Sequence
  source: /note="Description of Artificial Sequence: Synthetic peptide"
GGGGSGGGGSGGGGSGGGGS

SEQ ID NO: 10 - protein, 25 aa, Artificial Sequence
  source: /note="Description of Artificial Sequence: Synthetic peptide"
GGGGSGGGGSGGGGSGGGGSGGGGS

SEQ ID NO: 11 - protein, 18 aa, Artificial Sequence
  source: /note="Description of Artificial Sequence: Synthetic peptide"
GSTSGSGKPGSGEGSTKG

SEQ ID NO: 12 - protein, 14 aa, Artificial Sequence
  source: /note="Description of Artificial Sequence: Synthetic peptide"
IRPRAIGGSKPRVA

SEQ ID NO: 13 - protein, 15 aa, Artificial Sequence
  source: /note="Description of Artificial Sequence: Synthetic peptide"
GKGGSGKGGSGKGGS

SEQ ID NO: 14 - protein, 15 aa, Artificial Sequence
  source: /note="Description of Artificial Sequence: Synthetic peptide"
GGKGSGGKGSGGKGS

SEQ ID NO: 15 - protein, 15 aa, Artificial Sequence
  source: /note="Description of Artificial Sequence: Synthetic peptide"
GGGKSGGGKSGGGKS

SEQ ID NO: 16 - protein, 15 aa, Artificial Sequence
  source: /note="Description of Artificial Sequence: Synthetic peptide"
GKGKSGKGKSGKGKS

SEQ ID NO: 17 - protein, 15 aa, Artificial Sequence
  source: /note="Description of Artificial Sequence: Synthetic peptide"
GGGKSGGKGSGKGGS

SEQ ID NO: 18 - protein, 15 aa, Artificial Sequence
  source: /note="Description of Artificial Sequence: Synthetic peptide"
GKPGSGKPGSGKPGS

SEQ ID NO: 19 - protein, 20 aa, Artificial Sequence
  source: /note="Description of Artificial Sequence: Synthetic peptide"
GKPGSGKPGSGKPGSGKPGS

SEQ ID NO: 20 - protein, 20 aa, Artificial Sequence
  source: /note="Description of Artificial Sequence: Synthetic peptide"
GKGKSGKGKSGKGKSGKGKS

SEQ ID NO: 21 - protein, 14 aa, Artificial Sequence
  source: /note="Description of Artificial Sequence: Synthetic peptide"
STAGDTHLGGEDFD

SEQ ID NO: 22 - protein, 15 aa, Artificial Sequence
  source: /note="Description of Artificial Sequence: Synthetic peptide"
GEGGSGEGGSGEGGS

SEQ ID NO: 23 - protein, 15 aa, Artificial Sequence
  source: /note="Description of Artificial Sequence: Synthetic peptide"
GGEGSGGEGSGGEGS

SEQ ID NO: 24 - protein, 15 aa, Artificial Sequence
  source: /note="Description of Artificial Sequence: Synthetic peptide"
GEGESGEGESGEGES

SEQ ID NO: 25 - protein, 15 aa, Artificial Sequence
  source: /note="Description of Artificial Sequence: Synthetic peptide"
GGGESGGEGSGEGGS

SEQ ID NO: 26 - protein, 20 aa, Artificial Sequence
  source: /note="Description of Artificial Sequence: Synthetic peptide"
GEGESGEGESGEGESGEGES

SEQ ID NO: 27 - protein, 18 aa, Artificial Sequence
  source: /note="Description of Artificial Sequence: Synthetic peptide"
GSTSGSGKPGSGEGSTKG

SEQ ID NO: 28 - protein, 19 aa, Artificial Sequence
  source: /note="Description of Artificial Sequence: Synthetic peptide"
PRGASKSGSASQTGSAPGS

SEQ ID NO: 29 - DNA, 19 bp, Artificial Sequence
  source: /note="Description of Artificial Sequence: Synthetic oligonucleotide"
gtaaagagaaggaaagaag

SEQ ID NO: 30 - protein, 19 aa, Artificial Sequence
  source: /note="Description of Artificial Sequence: Synthetic peptide"
GTSGSSGSGSGGSGSGGGG

SEQ ID NO: 31 - protein, 20 aa, Artificial Sequence
  source: /note="Description of Artificial Sequence: Synthetic peptide"
GKPGSGKPGSGKPGSGKPGS

SEQ ID NO: 32 - protein, 4 aa, Artificial Sequence
  source: /note="Description of Artificial Sequence: Synthetic peptide"
GSGS

SEQ ID NO: 33 - protein, 10 aa, Artificial Sequence
  source: /note="Description of Artificial Sequence: Synthetic peptide"
APAPAPAPAP

SEQ ID NO: 34 - protein, 20 aa, Artificial Sequence
  source: /note="Description of Artificial Sequence: Synthetic peptide"
APAPAPAPAPAPAPAPAPAP

SEQ ID NO: 35 - protein, 32 aa, Artificial Sequence
  source: /note="Description of Artificial Sequence: Synthetic polypeptide"
AEAAAKEAAAKEAAAAKEAAAAKEAAAAKAAA

SEQ ID NO: 36 - protein, 16 aa, Artificial Sequence
  source: /note="Description of Artificial Sequence: Synthetic peptide"
GTEGKSSGSGSESKST

SEQ ID NO: 37 - protein, 121 aa, Artificial Sequence
  source: /note="Description of Artificial Sequence: Synthetic polypeptide"
QVQLQQSGAELARPGASVKMSCKASGYTFTRSTMHWVKQRPGQGLEWIGYINPSSAYTNYNQKFKDKATLTADKSSSTAYMQLSSLTSEDSAVYYCASPQVHYDYNGFPYWGQGTLVTVSA

SEQ ID NO: 38 - protein, 106 aa, Artificial Sequence
  source: /note="Description of Artificial Sequence: Synthetic polypeptide"
QVVLTQSPAIMSAFPGEKVTMTCSASSSVSYMNWYQQKSGTSPKRWIYDSSKLASGVPARFSGSGSGTSYSLTISSMETEDAATYYCQQWSRNPPTFGGGTKLQIT

SEQ ID NO: 39 - protein, 432 aa, Artificial Sequence
  source: /note="Description of Artificial Sequence: Synthetic polypeptide"
FKIPIEELEDRVFVNCNTSITWVEGTVGTLLSDITRLDLGKRILDPRGIYRCNGTDIYKDKESTVQVHYRMGSADDAKKDAAKKDDAKKDDAKKDGSDGNEEMGGITQTPYKVSISGTTVILTCPQYPGSEILWQHNDKNIGGDEDDKNIGSDEDHLSLKEFSELEQSGYYVCYPRGSKPEDANFYLYLRARVSPPSPAPELLGGPSVFLFPPKPKDTLMISRTPEVTCVVVDVSHEDPEVKFNWYVDGVEVHNAKTKPREEQYNSTYRVVSVLTVLHQDWLNGKEYKCKVSNKALPAPIEKTISKAKGQPREPQVYTLPPSRDELTKNQVSLTCLVKGFYPSDIAVEWESNGQPENNYKTTPPVLDSDGSFFLYSKLTVDKSRWQQGNVFSCSVMHEALHNHYTQKSLSLSPGKGGGLNDIFEAQKIEWHE

SEQ ID NO: 40 - protein, 121 aa, Artificial Sequence
  source: /note="Description of Artificial Sequence: Synthetic polypeptide"
QVQLVQSGAEVKKPGSSVKVSCKASGYTFTRSTMHWVRQAPGQGLEWMGYINPSSAYTNYNQKFQGRVTLTADKSTSTAYMELSSLRSEDTAVYYCARPQVHYDYNGFPYWGQGTLVTVSS

SEQ ID NO: 41 - protein, 121 aa, Artificial Sequence
  source: /note="Description of Artificial Sequence: Synthetic polypeptide"
EVQLVQSGAEVKKPGESLRISCKASGYTFTRSTMHWVRQMPGKGLEWMGYINPSSAYTNYNPSFQGHVTLSADKSISTAYLQWSSLKASDTAMYYCARPQVHYDYNGFPYWGQGTLVTVSS

SEQ ID NO: 42 - protein, 106 aa, Artificial Sequence
  source: /note="Description of Artificial Sequence: Synthetic polypeptide"
DIQLTQSPSSLSASVGDRVTITCSASSSVSYMNWYQQKPGTSPKRLIYDSSKLASGVPSRFSGSGSGTDYTLTISSLQPEDFATYYCQQWSRNPPTFGGGTKVEIK

SEQ ID NO: 43 - protein, 106 aa, Artificial Sequence
  source: /note="Description of Artificial Sequence: Synthetic polypeptide"
EIVLTQSPATLSLSPGERATLSCSASSSVSYMNWYQQKPGTSPRRLIYDSSKLASGIPARFSGSGSGRDYTLTISSLEPEDFAVYYCQQWSRNPPTFGGGTKVEIK

SEQ ID NO: 44 - protein, 112 aa, Artificial Sequence
  source: /note="Description of Artificial Sequence: Synthetic polypeptide"
  MOD_RES (99)..(101): Any amino acid
QVQLVQSGAEVKKPGSSVKVSCKASGGTFSSYTISWVRQAPGQGLEWMGRIIPILGIANYAQKFQGRVTITADKSTSTAYMELSSLRSEDTAVYYCARXXXWGQGTTVTVSS

SEQ ID NO: 45 - protein, 112 aa, Artificial Sequence; identical to SEQ ID NO: 44
  source: /note="Description of Artificial Sequence: Synthetic polypeptide"
  MOD_RES (99)..(101): Any amino acid

SEQ ID NO: 46 - protein, 108 aa, Artificial Sequence
  source: /note="Description of Artificial Sequence: Synthetic polypeptide"
  MOD_RES (96)..(98): Any amino acid
EIVLTQSPATLSLSPGERATLSCRASQSVSSYLAWYQQKPGQAPRLLIYDASNRATGIPARFSGSGSGRDFTLTISSLEPEDFAVYYCQQRSNWPXXXFGGGTKVEIK

SEQ ID NO: 47 - protein, 108 aa, Artificial Sequence; identical to SEQ ID NO: 46
  source: /note="Description of Artificial Sequence: Synthetic polypeptide"
  MOD_RES (96)..(98): Any amino acid

SEQ ID NO: 48 - protein, 121 aa, Artificial Sequence
  source: /note="Description of Artificial Sequence: Synthetic polypeptide"
QVQLVQSGAEVKKPGSSVKVSCKASGYTFTRSTMHWVRQAPGQGLEWMGYINPSSAYTNYAQKFQGRVTLTADKSTSTAYMELSSLRSEDTAVYYCASPQVHYDYNGFPYWGQGTLVTVSS

SEQ ID NO: 49 - protein, 121 aa, Artificial Sequence
  source: /note="Description of Artificial Sequence: Synthetic polypeptide"
QVQLVQSGAEVKKPGSSVKVSCKASGYTFTRSTMHWVRQAPGQGLEWIGYINPSSAYTNYAQKFQGRVTLTADKSTSTAYMELSSLRSEDTAVYYCASPQVHYDYNGFPYWGQGTLVTVSS

SEQ ID NO: 50 - protein, 121 aa, Artificial Sequence
  source: /note="Description of Artificial Sequence: Synthetic polypeptide"
QVQLVQSGAEVKKPGSSVKVSCKASGYTFTRSTMHWVRQAPGQGLEWMGYINPSSAYTNYNQKFQGRVTLTADKSTSTAYMELSSLRSEDTAVYYCASPQVHYDYNGFPYWGQGTLVTVSS

SEQ ID NO: 51 - protein, 121 aa, Artificial Sequence
  source: /note="Description of Artificial Sequence: Synthetic polypeptide"
QVQLVQSGAEVKKPGSSVKVSCKASGYTFTRSTMHWVRQAPGQGLEWIGYINPSSAYTNYNQKFQGRVTLTADKSTSTAYMELSSLRSEDTAVYYCASPQVHYDYNGFPYWGQGTLVTVSS

SEQ ID NO: 52 - protein, 121 aa, Artificial Sequence
  source: /note="Description of Artificial Sequence: Synthetic polypeptide"
QVQLVQSGAEVKKPGSSVKVSCKASGYTFTRSTMHWVKQAPGQGLEWMGYINPSSAYTNYAQKFQGRVTLTADKSTSTAYMELSSLRSEDTAVYYCASPQVHYDYNGFPYWGQGTLVTVSS

SEQ ID NO: 53 - protein, 121 aa, Artificial Sequence
  source: /note="Description of Artificial Sequence: Synthetic polypeptide"
QVQLVQSGAEVKKPGSSVKVSCKASGYTFTRSTMHWVKQAPGQGLEWIGYINPSSAYTNYAQKFQGRVTLTADKSTSTAYMELSSLRSEDTAVYYCASPQVHYDYNGFPYWGQGTLVTVSS

SEQ ID NO: 54 - protein, 121 aa, Artificial Sequence
  source: /note="Description of Artificial Sequence: Synthetic polypeptide"
QVQLVQSGAEVKKPGSSVKVSCKASGYTFTRSTMHWVKQAPGQGLEWMGYINPSSAYTNYNQKFQGRVTLTADKSTSTAYMELSSLRSEDTAVYYCASPQVHYDYNGFPYWGQGTLVTVSS

SEQ ID NO: 55 - protein, 121 aa, Artificial Sequence
  source: /note="Description of Artificial Sequence: Synthetic polypeptide"
QVQLVQSGAEVKKPGSSVKVSCKASGYTFTRSTMHWVKQAPGQGLEWIGYINPSSAYTNYNQKFQGRVTLTADKSTSTAYMELSSLRSEDTAVYYCASPQVHYDYNGFPYWGQGTLVTVSS

SEQ ID NO: 56 - protein, 106 aa, Artificial Sequence
  source: /note="Description of Artificial Sequence: Synthetic polypeptide"
EIVLTQSPATLSASPGERVTLSCSASSSVSYMNWYQQKPGQAPRRLIYDSSKLASGVPARFSGSGSGRDYTLTISSLEPEDFAVYYCQQWSRNPPTFGGGTKVEIK

SEQ ID NO: 57 - protein, 106 aa, Artificial Sequence
  source: /note="Description of Artificial Sequence: Synthetic polypeptide"
EIVLTQSPATLSASPGERVTLSCSASSSVSYMNWYQQKPGQSPRRLIYDSSKLASGVPARFSGSGSGRDYTLTISSLEPEDFAVYYCQQWSRNPPTFGGGTKVEIK

SEQ ID NO: 58 - protein, 106 aa, Artificial Sequence
  source: /note="Description of Artificial Sequence: Synthetic polypeptide"
EIVLTQSPATLSASPGERVTLSCSASSSVSYMNWYQQKPGQAPRRWIYDSSKLASGVPARFSGSGSGRDYTLTISSLEPEDFAVYYCQQWSRNPPTFGGGTKVEIK

SEQ ID NO: 59 - protein, 106 aa, Artificial Sequence
  source: /note="Description of Artificial Sequence: Synthetic polypeptide"
EIVLTQSPATLSASPGERVTLSCSASSSVSYMNWYQQKPGQSPRRWIYDSSKLASGVPARFSGSGSGRDYTLTISSLEPEDFAVYYCQQWSRNPPTFGGGTKVEIK

SEQ ID NO: 60 - protein, 106 aa, Artificial Sequence
  source: /note="Description of Artificial Sequence: Synthetic polypeptide"
EIVLTQSPATLSASPGERVTLSCSASSSVSYMNWYQQKPGTAPRRLIYDSSKLASGVPARFSGSGSGRDYTLTISSLEPEDFAVYYCQQWSRNPPTFGGGTKVEIK

SEQ ID NO: 61 - protein, 106 aa, Artificial Sequence
  source: /note="Description of Artificial Sequence: Synthetic polypeptide"
EIVLTQSPATLSASPGERVTLSCSASSSVSYMNWYQQKPGTSPRRLIYDSSKLASGVPARFSGSGSGRDYTLTISSLEPEDFAVYYCQQWSRNPPTFGGGTKVEIK

SEQ ID NO: 62 - protein, 106 aa, Artificial Sequence
  source: /note="Description of Artificial Sequence: Synthetic polypeptide"
EIVLTQSPATLSASPGERVTLSCSASSSVSYMNWYQQKPGTAPRRWIYDSSKLASGVPARFSGSGSGRDYTLTISSLEPEDFAVYYCQQWSRNPPTFGGGTKVEIK

SEQ ID NO: 63 - protein, 106 aa, Artificial Sequence
  source: /note="Description of Artificial Sequence: Synthetic polypeptide"
EIVLTQSPATLSASPGERVTLSCSASSSVSYMNWYQQKPGTSPRRWIYDSSKLASGVPARFSGSGSGRDYTLTISSLEPEDFAVYYCQQWSRNPPTFGGGTKVEIK

SEQ ID NO: 64 - DNA, 363 bp, Artificial Sequence
  source: /note="Description of Artificial Sequence: Synthetic polynucleotide"
caggttcagctggttcagtctggcgccgaagtgaagaaacctggctcctccgtcaaggtgtcctgcaaggcttccggctacacctttaccagatccaccatgcactgggtcaaacaggctccaggacaaggcttggagtggatcggctacatcaaccccagctccgcctacaccaactacaaccagaaattccagggcagagtcaccctcaccgccgacaagtctacctccaccgcctacatggaactgtccagcctgagatctgaggacaccgccgtgtactactgcgccagccctcaggtgcactacgactacaacggcttcccttattggggccagggcaccctggttaccgtttcttct

SEQ ID NO: 65 - DNA, 363 bp, Artificial Sequence
  source: /note="Description of Artificial Sequence: Synthetic polynucleotide"
caggttcagctggttcagtctggcgccgaagtgaagaaacctggctcctccgtcaaggtgtcctgcaaggcttccggctacacctttaccagatccaccatgcactgggtcaaacaggctccaggacaaggcttggagtggatgggctacatcaaccccagctccgcctacaccaactacaaccagaaattccagggcagagtcaccctcaccgccgacaagtctacctccaccgcctacatggaactgtccagcctgagatctgaggacaccgccgtgtactactgcgccagccctcaggttcactacgactacaacggcttcccttattggggccagggcaccctggttaccgtttcttct

SEQ ID NO: 66 - DNA, 363 bp, Artificial Sequence
  source: /note="Description of Artificial Sequence: Synthetic polynucleotide"
caggttcagctggttcagtctggcgccgaagtgaagaaacctggctcctccgtcaaggtgtcctgcaaggcttccggctacacctttaccagatccaccatgcactgggtccgacaggctccaggccaaggcttggagtggatgggctacatcaaccccagctccgcctacaccaactacgcccagaaattccagggcagagtcaccctcaccgccgacaagtctacctccaccgcctacatggaactgtccagcctgagatctgaggacaccgccgtgtactactgcgccagccctcaggtgcactacgactacaacggcttcccttattggggccagggcaccctggttaccgtttcttct

SEQ ID NO: 67 - DNA, 318 bp, Artificial Sequence
  source: /note="Description of Artificial Sequence: Synthetic polynucleotide"
gagatcgtgctgacccagtctcctgccacactgtcagcctctccaggcgagagagtcaccctgtcctgctccgcttcctcctccgtgtcctacatgaactggtatcagcagaagcccggccagtctcctagacggtggatctacgactcctccaagctggcctctggcgtccctgcccgcttttccggctctgggtctggcagagactataccctgaccatctccagcctggaacctgaggacttcgccgtgtactactgccagcagtggtctagaaaccctcctacctttggcggaggcaccaaggtggaaatcaag

SEQ ID NO: 68 - DNA, 318 bp, Artificial Sequence
  source: /note="Description of Artificial Sequence: Synthetic polynucleotide"
gagatcgtgctgacccagtctcctgccacactgtcagcctctccaggcgagagagtcaccctgtcctgctccgcttcctcctccgtgtcctacatgaactggtatcagcagaagcccggccaggctcctagacggtggatctacgactcctccaagctggcctctggcgtccctgcccgcttttccggctctggctctggcagagactataccctgaccatctccagcctggaacctgaggacttcgccgtgtactactgccagcagtggtctagaaaccctcctacctttggcggaggcaccaaggtggaaatcaag

SEQ ID NO: 69 - DNA, 318 bp, Artificial Sequence
  source: /note="Description of Artificial Sequence: Synthetic polynucleotide"
gagatcgtgctgacccagtctcctgccacactgtcagcctctccaggcgagagagtcaccctgtcctgctccgcttcctcctccgtgtcctacatgaactggtatcagcagaagcccggccaggctcctagacggctgatctacgactcctccaagctggcctctggcgtccctgcccgcttttccggctctgggtctggcagagactataccctgaccatctccagcctggaacctgaggacttcgccgtgtactactgccagcagtggtctagaaaccctcctacctttggcggaggcaccaaggtggaaatcaag

SEQ ID NO: 70 - protein, 5 aa, Artificial Sequence
  source: /note="Description of Artificial Sequence: Synthetic peptide"
RSTMH

SEQ ID NO: 71 - protein, 17 aa, Artificial Sequence
  source: /note="Description of Artificial Sequence: Synthetic peptide"
YINPSSAYTNYNQKFQG

SEQ ID NO: 72 - protein, 12 aa, Artificial Sequence
  source: /note="Description of Artificial Sequence: Synthetic peptide"
PQVHYDYNGFPY

SEQ ID NO: 73 - protein, 7 aa, Artificial Sequence
  source: /note="Description of Artificial Sequence: Synthetic peptide"
GYTFTRS

SEQ ID NO: 74 - protein, 6 aa, Artificial Sequence
  source: /note="Description of Artificial Sequence: Synthetic peptide"
NPSSAY

SEQ ID NO: 75 - protein, 11 aa, Artificial Sequence
  source: /note="Description of Artificial Sequence: Synthetic peptide"
PQVHYDYNGFP

SEQ ID NO: 76 - protein, 8 aa, Artificial Sequence
  source: /note="Description of Artificial Sequence: Synthetic peptide"
GYTFTRST

SEQ ID NO: 77 - protein, 8 aa, Artificial Sequence
  source: /note="Description of Artificial Sequence: Synthetic peptide"
INPSSAYT

SEQ ID NO: 78 - protein, 14 aa, Artificial Sequence
  source: /note="Description of Artificial Sequence: Synthetic peptide"
ASPQVHYDYNGFPY

SEQ ID NO: 79 - protein, 10 aa, Artificial Sequence
  source: /note="Description of Artificial Sequence: Synthetic peptide"
SASSSVSYMN

SEQ ID NO: 80 - protein, 7 aa, Artificial Sequence
  source: /note="Description of Artificial Sequence: Synthetic peptide"
DSSKLAS

SEQ ID NO: 81 - protein, 9 aa, Artificial Sequence
  source: /note="Description of Artificial Sequence: Synthetic peptide"
QQWSRNPPT

SEQ ID NO: 82 - protein, 6 aa, Artificial Sequence
  source: /note="Description of Artificial Sequence: Synthetic peptide"
SSSVSY

SEQ ID NO: 83 - protein, 3 aa, Artificial Sequence
  source: /note="Description of Artificial Sequence: Synthetic peptide"
DSS

SEQ ID NO: 84 - protein, 6 aa, Artificial Sequence
  source: /note="Description of Artificial Sequence: Synthetic peptide"
WSRNPP

SEQ ID NO: 85 - protein, 5 aa, Artificial Sequence
  source: /note="Description of Artificial Sequence: Synthetic peptide"
SSVSY

SEQ ID NO: 86 - protein, 12 aa, Artificial Sequence
  source: /note="Description of Artificial Sequence: Synthetic peptide"
  VARIANT (8)..(8): /replace="A" or "G" or "S"
  SITE (1)..(12): /note="Variant residues given in the sequence have no preference with respect to those in the annotations for variant positions"
PQVHYDYQGFPY

SEQ ID NO: 87 - protein, 12 aa, Artificial Sequence
  source: /note="Description of Artificial Sequence: Synthetic peptide"
PQVHYDYAGFPY

SEQ ID NO: 88 - protein, 121 aa, Artificial Sequence
  source: /note="Description of Artificial Sequence: Synthetic polypeptide"
QVQLVQSGAEVKKPGSSVKVSCKASGYTFTRSTMHWVKQAPGQGLEWIGYINPSSAYTNYNQKFQGRVTLTADKSTSTAYMELSSLRSEDTAVYYCASPQVHYDYAGFPYWGQGTLVTVSS

SEQ ID NO: 89 - DNA, 363 bp, Artificial Sequence
  source: /note="Description of Artificial Sequence: Synthetic polynucleotide"
caggttcaactggttcagtctggcgccgaagtgaagaaacctggctcctccgtcaaggtgtcctgcaaggcttccggctacacctttaccagatccaccatgcactgggtcaagcaggcccctggacaaggcttggagtggatcggctacatcaaccccagctccgcctacaccaactacaaccagaaattccagggcagagtgaccctgaccgccgacaagtctacctccaccgcctacatggaactgtccagcctgagatctgaggacaccgccgtgtactactgcgcctctcctcaggtccactacgactacgccggctttccttattggggccagggcacactggtcaccgtttcttct

SEQ ID NO: 90 - protein, 12 aa, Artificial Sequence
  source: /note="Description of Artificial Sequence: Synthetic peptide"
PQVHYDYGGFPY

SEQ ID NO: 91 - DNA, 363 bp, Artificial Sequence
  source: /note="Description of Artificial Sequence: Synthetic polynucleotide"
caggttcaactggttcagtctggcgccgaagtgaagaaacctggctcctccgtgaaagtgtcctgcaaggcttccggctacacttttaccagatccaccatgcactgggtccgacaggctccaggacaaggcttggagtggatgggctacatcaaccccagctccgcctacaccaactacgcccagaaattccagggcagagtgaccctgaccgccgacaagtctacctccaccgcctacatggaactgtccagcctgagatctgaggacaccgccgtgtactactgcgcttctcctcaggtgcactacgactacggcggctttccttattggggccagggcacactggtcaccgtttcttct

SEQ ID NO: 92 - protein, 805 aa, Artificial Sequence
  source: /note="Description of Artificial Sequence: Synthetic polypeptide"
QDGNEEMGGITQTPYKVSISGTTVILTCPQYPGSEILWQHNDKNIGGDEDDKNIGSDEDHLSLKEFSELEQSGYYVCYPRGSKPEDANFYLYLRARVGSADDAKKDAAKKDDAKKDDAKKDGSQSIKGNHLVKVYDYQEDGSVLLTCDAEAKNITWFKDGKMIGFLTEDKKKWNLGSNAKDPRGMYQCKGSQNKSKPLQVYYRMGGGSDAHKSEVAHRFKDLGEENFKALVLIAFAQYLQQSPFEDHVKLVNEVTEFAKTCVADESAENCDKSLHTLFGDKLCTVATLRETYGEMADCCAKQEPERNECFLQHKDDNPNLPRLVRPEVDVMCTAFHDNEETFLKKYLYEIARRHPYFYAPELLFFAKRYKAAFTECCQAADKAACLLPKLDELRDEGKASSAKQRLKCASLQKFGERAFKAWAVARLSQRFPKAEFAEVSKLVTDLTKVHTECCHGDLLECADDRADLAKYICENQDSISSKLKECCEKPLLEKSHCIAEVENDEMPADLPSLAADFVESKDVCKNYAEAKDVFLGMFLYEYARRHPDYSVVLLLRLAKTYETTLEKCCAAADPHECYAKVFDEFKPLVEEPQNLIKQNCELFEQLGEYKFQNALLVRYTKKVPQVSTPTLVEVSRNLGKVGSKCCKHPEAKRMPCAEDYLSVVLNQLCVLHEKTPVSDRVTKCCTESLVNRRPCFSALEVDETYVPKEFNAETFTFHADICTLSEKERQIKKQTALVELVKHKPKATKEQLKAVMDDFAAFVEKCCKADDKETCFAEEGKKLVAASQAALGLGGGSHHHHHHHH

SEQ ID NO: 93 - protein, 450 aa, Artificial Sequence
  source: /note="Description of Artificial Sequence: Synthetic polypeptide"
QVQLLQSAAEVKKPGESLKISCKGSGYTFTRSTMHWVRQTPGKGLEWMGYINPSSAYTNYNQKFKDQVTISADKSISTAYLQWSSLKASDTAMYYCARPQVHYDYQGFPYWGQGTLVTVSSASTKGPSVFPLAPSSKSTSGGTAALGCLVKDYFPEPVTVSWNSGALTSGVHTFPAVLQSSGLYSLSSVVTVPSSSLGTQTYICNVNHKPSNTKVDKKVEPKSCDKTHTCPPCPAPEAAGGPSVFLFPPKPKDTLMISRTPEVTCVVVSVSHEDPEVKFNWYVDGVEVHNAKTKPREEQYNSTYRVVSVLTVLHQDWLNGKEYKCKVSNKALPAPIEKTISKAKGQPREPQVYVYPPSREEMTKNQVSLTCLVKGFYPSDIAVEWESNGQPENNYKTTPPVLDSDGSFALVSKLTVDKSRWQQGNVFSCSVMHEALHNHYTQKSLSLSPG

SEQ ID NO: 94 - protein, 213 aa, Artificial Sequence
  source: /note="Description of Artificial Sequence: Synthetic polypeptide"
EIVLTQSPSAMSASVGDRVTITCSASSSVSYMNWYQQKPGKVPKRLIYDSSKLASGVPSRFSGSGSGTEYTLTISSLQPEDFATYYCQQWSRNPPTFGQGTMLEIKRTVAAPSVFIFPPSDEQLKSGTASVVCLLNNFYPREAKVQWKVDNALQSGNSQESVTEQDSKDSTYSLSSTLTLSKADYEKHKVYACEVTHQGLSSPVTKSFNRGEC

SEQ ID NO: 95 - protein, 231 aa, Artificial Sequence
  source: /note="Description of Artificial Sequence: Synthetic polypeptide"
EPKSSDKTHTCPPCPAPEAAGGPSVFLFPPKPKDTLMISRTPEVTCVVVSVSHEDPEVKFNWYVDGVEVHNAKTKPREEQYNSTYRVVSVLTVLHQDWLNGKEYKCKVSNKALPAPIEKTISKAKGQPREPQVYVYPPSREEMTKNQVSLTCLVKGFYPSDIAVEWESNGQPENNYKTTPPVLDSDGSFALVSKLTVDKSRWQQGNVFSCSVMHEALHNHYTQKSLSLSPG

SEQ ID NO: 96 - protein, 247 aa, Artificial Sequence
  source: /note="Description of Artificial Sequence: Synthetic polypeptide"
EIVLTQSPATLSASPGERVTLSCSASSSVSYMNWYQQKPGQAPRRWIYDSSKLASGVPARFSGSGSGRDYTLTISSLEPEDFAVYYCQQWSRNPPTFGGGTKVEIKGGSEGKSSGSGSESKSTGGSQVQLVQSGAEVKKPGSSVKVSCKASGYTFTRSTMHWVRQAPGQGLEWMGYINPSSAYTNYAQKFQGRVTLTADKSTSTAYMELSSLRSEDTAVYYCASPQVHYDYSGFPYWGQGTLVTVSS

SEQ ID NO: 97 - protein, 247 aa, Artificial Sequence
  source: /note="Description of Artificial Sequence: Synthetic polypeptide"
EIVLTQSPATLSASPGERVTLSCSASSSVSYMNWYQQKPGQAPRRWIYDSSKLASGVPARFSGSGSGRDYTLTISSLEPEDFAVYYCQQWSRNPPTFGGGTKVEIKGGSEGKSSGSGSESKSTGGSQVQLVQSGAEVKKPGSSVKVSCKASGYTFTRSTMHWVRQAPGQGLEWMGYINPSSAYTNYAQKFQGRVTLTADKSTSTAYMELSSLRSEDTAVYYCASPQVHYDYQGFPYWGQGTLVTVSS

SEQ ID NO: 98 - protein, 247 aa, Artificial Sequence
  source: /note="Description of Artificial Sequence: Synthetic polypeptide"
EIVLTQSPATLSASPGERVTLSCSASSSVSYMNWYQQKPGQAPRRWIYDSSKLASGVPARFSGSGSGRDYTLTISSLEPEDFAVYYCQQWSRNPPTFGGGTKVEIKGGSEGKSSGSGSESKSTGGSQVQLVQSGAEVKKPGSSVKVSCKASGYTFTRSTMHWVRQAPGQGLEWMGYINPSSAYTNYAQKFQGRVTLTADKSTSTAYMELSSLRSEDTAVYYCASPQVHYDYGGFPYWGQGTLVTVSS

SEQ ID NO: 99 - protein, 247 aa, Artificial Sequence
  source: /note="Description of Artificial Sequence: Synthetic polypeptide"
EIVLTQSPATLSASPGERVTLSCSASSSVSYMNWYQQKPGQAPRRWIYDSSKLASGVPARFSGSGSGRDYTLTISSLEPEDFAVYYCQQWSRNPPTFGGGTKVEIKGGSEGKSSGSGSESKSTGGSQVQLVQSGAEVKKPGSSVKVSCKASGYTFTRSTMHWVRQAPGQGLEWMGYINPSSAYTNYAQKFQGRVTLTADKSTSTAYMELSSLRSEDTAVYYCASPQVHYDYAGFPYWGQGTLVTVSS

SEQ ID NO: 100 - protein, 247 aa, Artificial Sequence
  source: /note="Description of Artificial Sequence: Synthetic polypeptide"
EIVLTQSPATLSASPGERVTLSCSASSSVSYMNWYQQKPGQAPRRWIYDSSKLASGVPARFSGSGSGRDYTLTISSLEPEDFAVYYCQQWSRNPPTFGGGTKVEIKGGSEGKSSGSGSESKSTGGSQVQLVQSGAEVKKPGSSVKVSCKASGYTFTRSTMHWVRQAPGQGLEWMGYINPSSAYTNYAQKFQGRVTLTADKSTSTAYMELSSLRSEDTAVYYCASPQVHYDYNGFPYWGQGTLVTVSS

SEQ ID NO: 101 - protein, 247 aa, Artificial Sequence
  source: /note="Description of Artificial Sequence: Synthetic polypeptide"
EIVLTQSPATLSASPGERVTLSCSASSSVSYMNWYQQKPGQAPRRLIYDSSKLASGVPARFSGSGSGRDYTLTISSLEPEDFAVYYCQQWSRNPPTFGGGTKVEIKGGSEGKSSGSGSESKSTGGSQVQLVQSGAEVKKPGSSVKVSCKASGYTFTRSTMHWVKQAPGQGLEWMGYINPSSAYTNYNQKFQGRVTLTADKSTSTAYMELSSLRSEDTAVYYCASPQVHYDYSGFPYWGQGTLVTVSS

SEQ ID NO: 102 - protein, 247 aa, Artificial Sequence
  source: /note="Description of Artificial Sequence: Synthetic polypeptide"
EIVLTQSPATLSASPGERVTLSCSASSSVSYMNWYQQKPGQAPRRLIYDSSKLASGVPARFSGSGSGRDYTLTISSLEPEDFAVYYCQQWSRNPPTFGGGTKVEIKGGSEGKSSGSGSESKSTGGSQVQLVQSGAEVKKPGSSVKVSCKASGYTFTRSTMHWVKQAPGQGLEWMGYINPSSAYTNYNQKFQGRVTLTADKSTSTAYMELSSLRSEDTAVYYCASPQVHYDYQGFPYWGQGTLVTVSS

SEQ ID NO: 103 - protein, 247 aa, Artificial Sequence
  source: /note="Description of Artificial Sequence: Synthetic polypeptide"
EIVLTQSPATLSASPGERVTLSCSASSSVSYMNWYQQKPGQAPRRLIYDSSKLASGVPARFSGSGSGRDYTLTISSLEPEDFAVYYCQQWSRNPPTFGGGTKVEIKGGSEGKSSGSGSESKSTGGSQVQLVQSGAEVKKPGSSVKVSCKASGYTFTRSTMHWVKQAPGQGLEWMGYINPSSAYTNYNQKFQGRVTLTADKSTSTAYMELSSLRSEDTAVYYCASPQVHYDYGGFPYWGQGTLVTVSS

SEQ ID NO: 104 - protein, 247 aa, Artificial Sequence
  source: /note="Description of Artificial Sequence: Synthetic polypeptide"
EIVLTQSPATLSASPGERVTLSCSASSSVSYMNWYQQKPGQAPRRLIYDSSKLASGVPARFSGSGSGRDYTLTISSLEPEDFAVYYCQQWSRNPPTFGGGTKVEIKGGSEGKSSGSGSESKSTGGSQVQLVQSGAEVKKPGSSVKVSCKASGYTFTRSTMHWVKQAPGQGLEWMGYINPSSAYTNYNQKFQGRVTLTADKSTSTAYMELSSLRSEDTAVYYCASPQVHYDYAGFPYWGQGTLVTVSS

SEQ ID NO: 105 - protein, 247 aa, Artificial Sequence
  source: /note="Description of Artificial Sequence: Synthetic polypeptide"
EIVLTQSPATLSASPGERVTLSCSASSSVSYMNWYQQKPGQAPRRLIYDSSKLASGVPARFSGSGSGRDYTLTISSLEPEDFAVYYCQQWSRNPPTFGGGTKVEIKGGSEGKSSGSGSESKSTGGSQVQLVQSGAEVKKPGSSVKVSCKASGYTFTRSTMHWVKQAPGQGLEWMGYINPSSAYTNYNQKFQGRVTLTADKSTSTAYMELSSLRSEDTAVYYCASPQVHYDYNGFPYWGQGTLVTVSS

SEQ ID NO: 106 - protein, 247 aa, Artificial Sequence
  source: /note="Description of Artificial Sequence: Synthetic polypeptide"
EIVLTQSPATLSASPGERVTLSCSASSSVSYMNWYQQKPGQAPRRWIYDSSKLASGVPARFSGSGSGRDYTLTISSLEPEDFAVYYCQQWSRNPPTFGGGTKVEIKGGSEGKSSGSGSESKSTGGSQVQLVQSGAEVKKPGSSVKVSCKASGYTFTRSTMHWVKQAPGQGLEWIGYINPSSAYTNYNQKFQGRVTLTADKSTSTAYMELSSLRSEDTAVYYCASPQVHYDYSGFPYWGQGTLVTVSS

SEQ ID NO: 107 - protein, 247 aa, Artificial Sequence
  source: /note="Description of Artificial Sequence: Synthetic polypeptide"
EIVLTQSPATLSASPGERVTLSCSASSSVSYMNWYQQKPGQAPRRWIYDSSKLASGVPARFSGSGSGRDYTLTISSLEPEDFAVYYCQQWSRNPPTFGGGTKVEIKGGSEGKSSGSGSESKSTGGSQVQLVQSGAEVKKPGSSVKVSCKASGYTFTRSTMHWVKQAPGQGLEWIGYINPSSAYTNYNQKFQGRVTLTADKSTSTAYMELSSLRSEDTAVYYCASPQVHYDYGGFPYWGQGTLVTVSS

SEQ ID NO: 108 - protein, 247 aa, Artificial Sequence
  source: /note="Description of Artificial Sequence: Synthetic polypeptide"
EIVLTQSPATLSASPGERVTLSCSASSSVSYMNWYQQKPGQAPRRWIYDSSKLASGVPARFSGSGSGRDYTLTISSLEPEDFAVYYCQQWSRNPPTFGGGTKVEIKGGSEGKSSGSGSESKSTGGSQVQLVQSGAEVKKPGSSVKVSCKASGYTFTRSTMHWVKQAPGQGLEWIGYINPSSAYTNYNQKFQGRVTLTADKSTSTAYMELSSLRSEDTAVYYCASPQVHYDYAGFPYWGQGTLVTVSS

SEQ ID NO: 109 - protein, 247 aa, Artificial Sequence
  source: /note="Description of Artificial Sequence: Synthetic polypeptide"
EIVLTQSPATLSASPGERVTLSCSASSSVSYMNWYQQKPGQAPRRWIYDSSKLASGVPARFSGSGSGRDYTLTISSLEPEDFAVYYCQQWSRNPPTFGGGTKVEIKGGSEGKSSGSGSESKSTGGSQVQLVQSGAEVKKPGSSVKVSCKASGYTFTRSTMHWVKQAPGQGLEWIGYINPSSAYTNYNQKFQGRVTLTADKSTSTAYMELSSLRSEDTAVYYCASPQVHYDYNGFPYWGQGTLVTVSS

SEQ ID NO: 110 - protein, 247 aa, Artificial Sequence
  source: /note="Description of Artificial Sequence: Synthetic polypeptide"
QVQLVQSGAEVKKPGSSVKVSCKASGYTFTRSTMHWVRQAPGQGLEWMGYINPSSAYTNYAQKFQGRVTLTADKSTSTAYMELSSLRSEDTAVYYCASPQVHYDYSGFPYWGQGTLVTVSSGGSEGKSSGSGSESKSTGGSEIVLTQSPATLSASPGERVTLSCSASSSVSYMNWYQQKPGQAPRRWIYDSSKLASGVPARFSGSGSGRDYTLTISSLEPEDFAVYYCQQWSRNPPTFGGGTKVEIK

SEQ ID NO: 111 - protein, 247 aa, Artificial Sequence
  source: /note="Description of Artificial Sequence: Synthetic polypeptide"
QVQLVQSGAEVKKPGSSVKVSCKASGYTFTRSTMHWVRQAPGQGLEWMGYINPSSAYTNYAQKFQGRVTLTADKSTSTAYMELSSLRSEDTAVYYCASPQVHYDYQGFPYWGQGTLVTVSSGGSEGKSSGSGSESKSTGGSEIVLTQSPATLSASPGERVTLSCSASSSVSYMNWYQQKPGQAPRRWIYDSSKLASGVPARFSGSGSGRDYTLTISSLEPEDFAVYYCQQWSRNPPTFGGGTKVEIK

SEQ ID NO: 112 - protein, 247 aa, Artificial Sequence
  source: /note="Description of Artificial Sequence: Synthetic polypeptide"
QVQLVQSGAEVKKPGSSVKVSCKASGYTFTRSTMHWVRQAPGQGLEWMGYINPSSAYTNYAQKFQGRVTLTADKSTSTAYMELSSLRSEDTAVYYCASPQVHYDYGGFPYWGQGTLVTVSSGGSEGKSSGSGSESKSTGGSEIVLTQSPATLSASPGERVTLSCSASSSVSYMNWYQQKPGQAPRRWIYDSSKLASGVPARFSGSGSGRDYTLTISSLEPEDFAVYYCQQWSRNPPTFGGGTKVEIK

SEQ ID NO: 113 - protein, 247 aa, Artificial Sequence
  source: /note="Description of Artificial Sequence: Synthetic polypeptide"
QVQLVQSGAEVKKPGSSVKVSCKASGYTFTRSTMHWVRQAPGQGLEWMGYINPSSAYTNYAQKFQGRVTLTADKSTSTAYMELSSLRSEDTAVYYCASPQVHYDYAGFPYWGQGTLVTVSSGGSEGKSSGSGSESKSTGGSEIVLTQSPATLSASPGERVTLSCSASSSVSYMNWYQQKPGQAPRRWIYDSSKLASGVPARFSGSGSGRDYTLTISSLEPEDFAVYYCQQWSRNPPTFGGGTKVEIK

SEQ ID NO: 114 - protein, 247 aa, Artificial Sequence
  source: /note="Description of Artificial Sequence: Synthetic polypeptide"
QVQLVQSGAEVKKPGSSVKVSCKASGYTFTRSTMHWVRQAPGQGLEWMGYINPSSAYTNYAQKFQGRVTLTADKSTSTAYMELSSLRSEDTAVYYCASPQVHYDYNGFPYWGQGTLVTVSSGGSEGKSSGSGSESKSTGGSEIVLTQSPATLSASPGERVTLSCSASSSVSYMNWYQQKPGQAPRRWIYDSSKLASGVPARFSGSGSGRDYTLTISSLEPEDFAVYYCQQWSRNPPTFGGGTKVEIK

SEQ ID NO: 115 - protein, 247 aa, Artificial Sequence
  source: /note="Description of Artificial Sequence: Synthetic polypeptide"
QVQLVQSGAEVKKPGSSVKVSCKASGYTFTRSTMHWVKQAPGQGLEWMGYINPSSAYTNYNQKFQGRVTLTADKSTSTAYMELSSLRSEDTAVYYCASPQVHYDYSGFPYWGQGTLVTVSSGGSEGKSSGSGSESKSTGGSEIVLTQSPATLSASPGERVTLSCSASSSVSYMNWYQQKPGQAPRRLIYDSSKLASGVPARFSGSGSGRDYTLTISSLEPEDFAVYYCQQWSRNPPTFGGGTKVEIK

SEQ ID NO: 116 - protein, 247 aa, Artificial Sequence
  source: /note="Description of Artificial Sequence: Synthetic polypeptide"
QVQLVQSGAEVKKPGSSVKVSCKASGYTFTRSTMHWVKQAPGQGLEWMGYINPSSAYTNYNQKFQGRVTLTADKSTSTAYMELSSLRSEDTAVYYCASPQVHYDYQGFPYWGQGTLVTVSSGGSEGKSSGSGSESKSTGGSEIVLTQSPATLSASPGERVTLSCSASSSVSYMNWYQQKPGQAPRRLIYDSSKLASGVPARFSGSGSGRDYTLTISSLEPEDFAVYYCQQWSRNPPTFGGGTKVEIK

SEQ ID NO: 117 - protein, 247 aa, Artificial Sequence
  source: /note="Description of Artificial Sequence: Synthetic polypeptide"
QVQLVQSGAEVKKPGSSVKVSCKASGYTFTRSTMHWVKQAPGQGLEWMGYINPSSAYTNYNQKFQGRVTLTADKSTSTAYMELSSLRSEDTAVYYCASPQVHYDYGGFPYWGQGTLVTVSSGGSEGKSSGSGSESKSTGGSEIVLTQSPATLSASPGERVTLSCSASSSVSYMNWYQQKPGQAPRRLIYDSSKLASGVPARFSGSGSGRDYTLTISSLEPEDFAVYYCQQWSRNPPTFGGGTKVEIK

SEQ ID NO: 118 - protein, 247 aa, Artificial Sequence
  source: /note="Description of Artificial Sequence: Synthetic polypeptide"
QVQLVQSGAEVKKPGSSVKVSCKASGYTFTRSTMHWVKQAPGQGLEWMGYINPSSAYTNYNQKFQGRVTLTADKSTSTAYMELSSLRSEDTAVYYCASPQVHYDYAGFPYWGQGTLVTVSSGGSEGKSSGSGSESKSTGGSEIVLTQSPATLSASPGERVTLSCSASSSVSYMNWYQQKPGQAPRRLIYDSSKLASGVPARFSGSGSGRDYTLTISSLEPEDFAVYYCQQWSRNPPTFGGGTKVEIK

SEQ ID NO: 119 - protein, 247 aa, Artificial Sequence
  source: /note="Description of Artificial Sequence: Synthetic polypeptide"
QVQLVQSGAEVKKPGSSVKVSCKASGYTFTRSTMHWVKQAPGQGLEWMGYINPSSAYTNYNQKFQGRVTLTADKSTSTAYMELSSLRSEDTAVYYCASPQVHYDYNGFPYWGQGTLVTVSSGGSEGKSSGSGSESKSTGGSEIVLTQSPATLSASPGERVTLSCSASSSVSYMNWYQQKPGQAPRRLIYDSSKLASGVPARFSGSGSGRDYTLTISSLEPEDFAVYYCQQWSRNPPTFGGGTKVEIK

SEQ ID NO: 120 - protein, 247 aa, Artificial Sequence
  source: /note="Description of Artificial Sequence: Synthetic polypeptide"
QVQLVQSGAEVKKPGSSVKVSCKASGYTFTRSTMHWVKQAPGQGLEWIGYINPSSAYTNYNQKFQGRVTLTADKSTSTAYMELSSLRSEDTAVYYCASPQVHYDYSGFPYWGQGTLVTVSSGGSEGKSSGSGSESKSTGGSEIVLTQSPATLSASPGERVTLSCSASSSVSYMNWYQQKPGQAPRRWIYDSSKLASGVPARFSGSGSGRDYTLTISSLEPEDFAVYYCQQWSRNPPTFGGGTKVEIK

SEQ ID NO: 121 - protein, 247 aa, Artificial Sequence
  source: /note="Description of Artificial Sequence: Synthetic polypeptide"
QVQLVQSGAEVKKPGSSVKVSCKASGYTFTRSTMHWVKQAPGQGLEWIGYINPSSAYTNYNQKFQGRVTLTADKSTSTAYMELSSLRSEDTAVYYCASPQVHYDYGGFPYWGQGTLVTVSSGGSEGKSSGSGSESKSTGGSEIVLTQSPATLSASPGERVTLSCSASSSVSYMNWYQQKPGQAPRRWIYDSSKLASGVPARFSGSGSGRDYTLTISSLEPEDFAVYYCQQWSRNPPTFGGGTKVEIK

SEQ ID NO: 122 - protein, 247 aa, Artificial Sequence
  source: /note="Description of Artificial Sequence: Synthetic polypeptide"
QVQLVQSGAEVKKPGSSVKVSCKASGYTFTRSTMHWVKQAPGQGLEWIGYINPSSAYTNYNQKFQGRVTLTADKSTSTAYMELSSLRSEDTAVYYCASPQVHYDYAGFPYWGQGTLVTVSSGGSEGKSSGSGSESKSTGGSEIVLTQSPATLSASPGERVTLSCSASSSVSYMNWYQQKPGQAPRRWIYDSSKLASGVPARFSGSGSGRDYTLTISSLEPEDFAVYYCQQWSRNPPTFGGGTKVEIK

SEQ ID NO: 123 - protein, 247 aa, Artificial Sequence
  source: /note="Description of Artificial Sequence: Synthetic polypeptide"
QVQLVQSGAEVKKPGSSVKVSCKASGYTFTRSTMHWVKQAPGQGLEWIGYINPSSAYTNYNQKFQGRVTLTADKSTSTAYMELSSLRSEDTAVYYCASPQVHYDYNGFPYWGQGTLVTVSSGGSEGKSSGSGSESKSTGGSEIVLTQSPATLSASPGERVTLSCSASSSVSYMNWYQQKPGQAPRRWIYDSSKLASGVPARFSGSGSGRDYTLTISSLEPEDFAVYYCQQWSRNPPTFGGGTKVEIK

SEQ ID NO: 124 - protein, 247 aa, Artificial Sequence
  source: /note="Description of Artificial Sequence: Synthetic polypeptide"
EIVLTQSPATLSASPGERVTLSCSASSSVSYMNWYQQKPGQAPRRWIYDSSKLASGVPARFSGSGSGRDYTLTISSLEPEDFAVYYCQQWSRNPPTFGGGTKVEIKGGSEGKSSGSGSESKSTGGSQVQLVQSGAEVKKPGSSVKVSCKASGYTFTRSTMHWVKQAPGQGLEWIGYINPSSAYTNYNQKFQGRVTLTADKSTSTAYMELSSLRSEDTAVYYCASPQVHYDYQGFPYWGQGTLVTVSS

SEQ ID NO: 125 - protein, 247 aa, Artificial Sequence
  source: /note="Description of Artificial Sequence: Synthetic polypeptide"
QVQLVQSGAEVKKPGSSVKVSCKASGYTFTRSTMHWVKQAPGQGLEWIGYINPSSAYTNYNQKFQGRVTLTADKSTSTAYMELSSLRSEDTAVYYCASPQVHYDYQGFPYWGQGTLVTVSSGGSEGKSSGSGSESKSTGGSEIVLTQSPATLSASPGERVTLSCSASSSVSYMNWYQQKPGQAPRRWIYDSSKLASGVPARFSGSGSGRDYTLTISSLEPEDFAVYYCQQWSRNPPTFGGGTKVEIK

SEQ ID NO: 126 - protein, 247 aa, Artificial Sequence
  source: /note="Description of Artificial Sequence: Synthetic polypeptide"
QVQLVQSGAEVKKPGSSVKVSCKASGYTFTRSTMHWVKQAPGQGLEWIGYINPSSAYTNYNQKFQGRVTLTADKSTSTAYMELSSLRSEDTAVYYCASPQVHYDYQGFPYWGQGTLVTVSSGGSEGKSSGSGSESKSTGGSEIVLTQSPATLSASPGERVTLSCSASSSVSYMNWYQQKPGQSPRRWIYDSSKLASGVPARFSGSGSGRDYTLTISSLEPEDFAVYYCQQWSRNPPTFGGGTKVEIK

SEQ ID NO: 127 - protein, 478 aa, Artificial Sequence
  source: /note="Description of Artificial Sequence: Synthetic polypeptide"
EIVLTQSPATLSASPGERVTLSCSASSSVSYMNWYQQKPGQAPRRWIYDSSKLASGVPARFSGSGSGRDYTLTISSLEPEDFAVYYCQQWSRNPPTFGGGTKVEIKGGSEGKSSGSGSESKSTGGSQVQLVQSGAEVKKPGSSVKVSCKASGYTFTRSTMHWVRQAPGQGLEWMGYINPSSAYTNYAQKFQGRVTLTADKSTSTAYMELSSLRSEDTAVYYCASPQVHYDYSGFPYWGQGTLVTVSSEPKSSDKTHTCPPCPAPEAAGGPSVFLFPPKPKDTLMISRTPEVTCVVVSVSHEDPEVKFNWYVDGVEVHNAKTKPREEQYNSTYRVVSVLTVLHQDWLNGKEYKCKVSNKALPAPIEKTISKAKGQPREPQVYVYPPSREEMTKNQVSLTCLVKGFYPSDIAVEWESNGQPENNYKTTPPVLDSDGSFALVSKLTVDKSRWQQGNVFSCSVMHEALHNHYTQKSLSLSPG

SEQ ID NO: 128 - protein, 478 aa, Artificial Sequence
  source: /note="Description of Artificial Sequence: Synthetic polypeptide"
EIVLTQSPATLSASPGERVTLSCSASSSVSYMNWYQQKPGQAPRRWIYDSSKLASGVPARFSGSGSGRDYTLTISSLEPEDFAVYYCQQWSRNPPTFGGGTKVEIKGGSEGKSSGSGSESKSTGGSQVQLVQSGAEVKKPGSSVKVSCKASGYTFTRSTMHWVRQAPGQGLEWMGYINPSSAYTNYAQKFQGRVTLTADKSTSTAYMELSSLRSEDTAVYYCASPQVHYDYQGFPYWGQGTLVTVSSEPKSSDKTHTCPPCPAPEAAGGPSVFLFPPKPKDTLMISRTPEVTCVVVSVSHEDPEVKFNWYVDGVEVHNAKTKPREEQYNSTYRVVSVLTVLHQDWLNGKEYKCKVSNKALPAPIEKTISKAKGQPREPQVYVYPPSREEMTKNQVSLTCLVKGFYPSDIAVEWESNGQPENNYKTTPPVLDSDGSFALVSKLTVDKSRWQQGNVFSCSVMHEALHNHYTQKSLSLSPG

SEQ ID NO: 129 - protein, 478 aa, Artificial Sequence
  source: /note="Description of Artificial Sequence: Synthetic polypeptide"
EIVLTQSPATLSASPGERVTLSCSASSSVSYMNWYQQKPGQAPRRWIYDSSKLASGVPARFSGSGSGRDYTLTISSLEPEDFAVYYCQQWSRNPPTFGGGTKVEIKGGSEGKSSGSGSESKSTGGSQVQLVQSGAEVKKPGSSVKVSCKASGYTFTRSTMHWVRQAPGQGLEWMGYINPSSAYTNYAQKFQGRVTLTADKSTSTAYMELSSLRSEDTAVYYCASPQVHYDYGGFPYWGQGTLVTVSSEPKSSDKTHTCPPCPAPEAAGGPSVFLFPPKPKDTLMISRTPEVTCVVVSVSHEDPEVKFNWYVDGVEVHNAKTKPREEQYNSTYRVVSVLTVLHQDWLNGKEYKCKVSNKALPAPIEKTISKAKGQPREPQVYVYPPSREEMTKNQVSLTCLVKGFYPSDIAVEWESNGQPENNYKTTPPVLDSDGSFALVSKLTVDKSRWQQGNVFSCSVMHEALHNHYTQKSLSLSPG

SEQ ID NO: 130 - protein, 478 aa, Artificial Sequence
  source: /note="Description of Artificial Sequence: Synthetic polypeptide"
EIVLTQSPATLSASPGERVTLSCSASSSVSYMNWYQQKPGQAPRRWIYDSSKLASGVPARFSGSGSGRDYTLTISSLEPEDFAVYYCQQWSRNPPTFGGGTKVEIKGGSEGKSSGSGSESKSTGGSQVQLVQSGAEVKKPGSSVKVSCKASGYTFTRSTMHWVRQAPGQGLEWMGYINPSSAYTNYAQKFQGRVTLTADKSTSTAYMELSSLRSEDTAVYYCASPQVHYDYAGFPYWGQGTLVTVSSEPKSSDKTHTCPPCPAPEAAGGPSVFLFPPKPKDTLMISRTPEVTCVVVSVSHEDPEVKFNWYVDGVEVHNAKTKPREEQYNSTYRVVSVLTVLHQDWLNGKEYKCKVSNKALPAPIEKTISKAKGQPREPQVYVYPPSREEMTKNQVSLTCLVKGFYPSDIAVEWESNGQPENNYKTTPPVLDSDGSFALVSKLTVDKSRWQQGNVFSCSVMHEALHNHYTQKSLSLSPG

SEQ ID NO: 131 - protein, 478 aa, Artificial Sequence
  source: /note="Description of Artificial Sequence: Synthetic polypeptide"
EIVLTQSPATLSASPGERVTLSCSASSSVSYMNWYQQKPGQAPRRWIYDSSKLASGVPARFSGSGSGRDYTLTISSLEPEDFAVYYCQQWSRNPPTFGGGTKVEIKGGSEGKSSGSGSESKSTGGSQVQLVQSGAEVKKPGSSVKVSCKASGYTFTRSTMHWVRQAPGQGLEWMGYINPSSAYTNYAQKFQGRVTLTADKSTSTAYMELSSLRSEDTAVYYCASPQVHYDYNGFPYWGQGTLVTVSSEPKSSDKTHTCPPCPAPEAAGGPSVFLFPPKPKDTLMISRTPEVTCVVVSVSHEDPEVKFNWYVDGVEVHNAKTKPREEQYNSTYRVVSVLTVLHQDWLNGKEYKCKVSNKALPAPIEKTISKAKGQPREPQVYVYPPSREEMTKNQVSLTCLVKGFYPSDIAVEWESNGQPENNYKTTPPVLDSDGSFALVSKLTVDKSRWQQGNVFSCSVMHEALHNHYTQKSLSLSPG

SEQ ID NO: 132 - protein, 478 aa, Artificial Sequence
  source: /note="Description of Artificial Sequence: Synthetic polypeptide"
EIVLTQSPATLSASPGERVTLSCSASSSVSYMNWYQQKPGQAPRRLIYDSSKLASGVPARFSGSGSGRDYTLTISSLEPEDFAVYYCQQWSRNPPTFGGGTKVEIKGGSEGKSSGSGSESKSTGGSQVQLVQSGAEVKKPGSSVKVSCKASGYTFTRSTMHWVKQAPGQGLEWMGYINPSSAYTNYNQKFQGRVTLTADKSTSTAYMELSSLRSEDTAVYYCASPQVHYDYSGFPYWGQGTLVTVSSEPKSSDKTHTCPPCPAPEAAGGPSVFLFPPKPKDTLMISRTPEVTCVVVSVSHEDPEVKFNWYVDGVEVHNAKTKPREEQYNSTYRVVSVLTVLHQDWLNGKEYKCKVSNKALPAPIEKTISKAKGQPREPQVYVYPPSREEMTKNQVSLTCLVKGFYPSDIAVEWESNGQPENNYKTTPPVLDSDGSFALVSKLTVDKSRWQQGNVFSCSVMHEALHNHYTQKSLSLSPG

SEQ ID NO: 133 - protein, 478 aa, Artificial Sequence
  source: /note="Description of Artificial Sequence: Synthetic polypeptide"
EIVLTQSPATLSASPGERVTLSCSASSSVSYMNWYQQKPGQAPRRLIYDSSKLASGVPARFSGSGSGRDYTLTISSLEPEDFAVYYCQQWSRNPPTFGGGTKVEIKGGSEGKSSGSGSESKSTGGSQVQLVQSGAEVKKPGSSVKVSCKASGYTFTRSTMHWVKQAPGQGLEWMGYINPSSAYTNYNQKFQGRVTLTADKSTSTAYMELSSLRSEDTAVYYCASPQVHYDYQGFPYWGQGTLVTVSSEPKSSDKTHTCPPCPAPEAAGGPSVFLFPPKPKDTLMISRTPEVTCVVVSVSHEDPEVKFNWYVDGVEVHNAKTKPREEQYNSTYRVVSVLTVLHQDWLNGKEYKCKVSNKALPAPIEKTISKAKGQPREPQVYVYPPSREEMTKNQVSLTCLVKGFYPSDIAVEWESNGQPENNYKTTPPVLDSDGSFALVSKLTVDKSRWQQGNVFSCSVMHEALHNHYTQKSLSLSPG

SEQ ID NO: 134 - protein, 478 aa, Artificial Sequence
  source: /note="Description of Artificial Sequence: Synthetic polypeptide"
EIVLTQSPATLSASPGERVTLSCSASSSVSYMNWYQQKPGQAPRRLIYDSSKLASGVPARFSGSGSGRDYTLTISSLEPEDFAVYYCQQWSRNPPTFGGGTKVEIKGGSEGKSSGSGSESKSTGGSQVQLVQSGAEVKKPGSSVKVSCKASGYTFTRSTMHWVKQAPGQGLEWMGYINPSSAYTNYNQKFQGRVTLTADKSTSTAYMELSSLRSEDTAVYYCASPQVHYDYGGFPYWGQGTLVTVSSEPKSSDKTHTCPPCPAPEAAGGPSVFLFPPKPKDTLMISRTPEVTCVVVSVSHEDPEVKFNWYVDGVEVHNAKTKPREEQYNSTYRVVSVLTVLHQDWLNGKEYKCKVSNKALPAPIEKTISKAKGQPREPQVYVYPPSREEMTKNQVSLTCLVKGFYPSDIAVEWESNGQPENNYKTTPPVLDSDGSFALVSKLTVDKSRWQQGNVFSCSVMHEALHNHYTQKSLSLSPG

SEQ ID NO: 135 - protein, 478 aa, Artificial Sequence
  source: /note="Description of Artificial Sequence: Synthetic polypeptide"
EIVLTQSPATLSASPGERVTLSCSASSSVSYMNWYQQKPGQAPRRLIYDSSKLASGVPARFSGSGSGRDYTLTISSLEPEDFAVYYCQQWSRNPPTFGGGTKVEIKGGSEGKSSGSGSESKSTGGSQVQLVQSGAEVKKPGSSVKVSCKASGYTFTRSTMHWVKQAPGQGLEWMGYINPSSAYTNYNQKFQGRVTLTADKSTSTAYMELSSLRSEDTAVYYCASPQVHYDYAGFPYWGQGTLVTVSSEPKSSDKTHTCPPCPAPEAAGGPSVFLFPPKPKDTLMISRTPEVTCVVVSVSHEDPEVKFNWYVDGVEVHNAKTKPREEQYNSTYRVVSVLTVLHQDWLNGKEYKCKVSNKALPAPIEKTISKAKGQPREPQVYVYPPSREEMTKNQVSLTCLVKGFYPSDIAVEWESNGQPENNYKTTPPVLDSDGSFALVSKLTVDKSRWQQGNVFSCSVMHEALHNHYTQKSLSLSPG

SEQ ID NO: 136 - protein, 478 aa, Artificial Sequence
  source: /note="Description of Artificial Sequence: Synthetic polypeptide"
EIVLTQSPATLSASPGERVTLSCSASSSVSYMNWYQQKPGQAPRRLIYDSSKLASGVPARFSGSGSGRDYTLTISSLEPEDFAVYYCQQWSRNPPTFGGGTKVEIKGGSEGKSSGSGSESKSTGGSQVQLVQSGAEVKKPGSSVKVSCKASGYTFTRSTMHWVKQAPGQGLEWMGYINPSSAYTNYNQKFQGRVTLTADKSTSTAYMELSSLRSEDTAVYYCASPQVHYDYNGFPYWGQGTLVTVSSEPKSSDKTHTCPPCPAPEAAGGPSVFLFPPKPKDTLMISRTPEVTCVVVSVSHEDPEVKFNWYVDGVEVHNAKTKPREEQYNSTYRVVSVLTVLHQDWLNGKEYKCKVSNKALPAPIEKTISKAKGQPREPQVYVYPPSREEMTKNQVSLTCLVKGFYPSDIAVEWESNGQPENNYKTTPPVLDSDGSFALVSKLTVDKSRWQQGNVFSCSVMHEALHNHYTQKSLSLSPG

SEQ ID NO: 137 - protein, 478 aa, Artificial Sequence
  source: /note="Description of Artificial Sequence: Synthetic polypeptide"
EIVLTQSPATLSASPGERVTLSCSASSSVSYMNWYQQKPGQAPRRWIYDSSKLASGVPARFSGSGSGRDYTLTISSLEPEDFAVYYCQQWSRNPPTFGGGTKVEIKGGSEGKSSGSGSESKSTGGSQVQLVQSGAEVKKPGSSVKVSCKASGYTFTRSTMHWVKQAPGQGLEWIGYINPSSAYTNYNQKFQGRVTLTADKSTSTAYMELSSLRSEDTAVYYCASPQVHYDYSGFPYWGQGTLVTVSSEPKSSDKTHTCPPCPAPEAAGGPSVFLFPPKPKDTLMISRTPEVTCVVVSVSHEDPEVKFNWYVDGVEVHNAKTKPREEQYNSTYRVVSVLTVLHQDWLNGKEYKCKVSNKALPAPIEKTISKAKGQPREPQVYVYPPSREEMTKNQVSLTCLVKGFYPSDIAVEWESNGQPENNYKTTPPVLDSDGSFALVSKLTVDKSRWQQGNVFSCSVMHEALHNHYTQKSLSLSPG

SEQ ID NO: 138 - protein, 478 aa, Artificial Sequence
  source: /note="Description of Artificial Sequence: Synthetic polypeptide"
EIVLTQSPATLSASPGERVTLSCSASSSVSYMNWYQQKPGQAPRRWIYDSSKLASGVPARFSGSGSGRDYTLTISSLEPEDFAVYYCQQWSRNPPTFGGGTKVEIKGGSEGKSSGSGSESKSTGGSQVQLVQSGAEVKKPGSSVKVSCKASGYTFTRSTMHWVKQAPGQGLEWIGYINPSSAYTNYNQKFQGRVTLTADKSTSTAYMELSSLRSEDTAVYYCASPQVHYDYGGFPYWGQGTLVTVSSEPKSSDKTHTCPPCPAPEAAGGPSVFLFPPKPKDTLMISRTPEVTCVVVSVSHEDPEVKFNWYVDGVEVHNAKTKPREEQYNSTYRVVSVLTVLHQDWLNGKEYKCKVSNKALPAPIEKTISKAKGQPREPQVYVYPPSREEMTKNQVSLTCLVKGFYPSDIAVEWESNGQPENNYKTTPPVLDSDGSFALVSKLTVDKSRWQQGNVFSCSVMHEALHNHYTQKSLSLSPG

SEQ ID NO: 139 - protein, 478 aa, Artificial Sequence
  source: /note="Description of Artificial Sequence: Synthetic polypeptide"
EIVLTQSPATLSASPGERVTLSCSASSSVSYMNWYQQKPGQAPRRWIYDSSKLASGVPARFSGSGSGRDYTLTISSLEPEDFAVYYCQQWSRNPPTFGGGTKVEIKGGSEGKSSGSGSESKSTGGSQVQLVQSGAEVKKPGSSVKVSCKASGYTFTRSTMHWVKQAPGQGLEWIGYINPSSAYTNYNQKFQGRVTLTADKSTSTAYMELSSLRSEDTAVYYCASPQVHYDYAGFPYWGQGTLVTVSSEPKSSDKTHTCPPCPAPEAAGGPSVFLFPPKPKDTLMISRTPEVTCVVVSVSHEDPEVKFNWYVDGVEVHNAKTKPREEQYNSTYRVVSVLTVLHQDWLNGKEYKCKVSNKALPAPIEKTISKAKGQPREPQVYVYPPSREEMTKNQVSLTCLVKGFYPSDIAVEWESNGQPENNYKTTPPVLDSDGSFALVSKLTVDKSRWQQGNVFSCSVMHEALHNHYTQKSLSLSPG

SEQ ID NO: 140 - protein, 478 aa, Artificial Sequence
  source: /note="Description of Artificial Sequence: Synthetic polypeptide"
EIVLTQSPATLSASPGERVTLSCSASSSVSYMNWYQQKPGQAPRRWIYDSSKLASGVPARFSGSGSGRDYTLTISSLEPEDFAVYYCQQWSRNPPTFGGGTKVEIKGGSEGKSSGSGSESKSTGGSQVQLVQSGAEVKKPGSSVKVSCKASGYTFTRSTMHWVKQAPGQGLEWIGYINPSSAYTNYNQKFQGRVTLTADKSTSTAYMELSSLRSEDTAVYYCASPQVHYDYNGFPYWGQGTLVTVSSEPKSSDKTHTCPPCPAPEAAGGPSVFLFPPKPKDTLMISRTPEVTCVVVSVSHEDPEVKFNWYVDGVEVHNAKTKPREEQYNSTYRVVSVLTVLHQDWLNGKEYKCKVSNKALPAPIEKTISKAKGQPREPQVYVYPPSREEMTKNQVSLTCLVKGFYPSDIAVEWESNGQPENNYKTTPPVLDSDGSFALVSKLTVDKSRWQQGNVFSCSVMHEALHNHYTQKSLSLSPG

SEQ ID NO: 141 - protein, 478 aa, Artificial Sequence
  source: /note="Description of Artificial Sequence: Synthetic polypeptide"
QVQLVQSGAEVKKPGSSVKVSCKASGYTFTRSTMHWVRQAPGQGLEWMGYINPSSAYTNYAQKFQGRVTLTADKSTSTAYMELSSLRSEDTAVYYCASPQVHYDYSGFPYWGQGTLVTVSSGGSEGKSSGSGSESKSTGGSEIVLTQSPATLSASPGERVTLSCSASSSVSYMNWYQQKPGQAPRRWIYDSSKLASGVPARFSGSGSGRDYTLTISSLEPEDFAVYYCQQWSRNPPTFGGGTKVEIKEPKSSDKTHTCPPCPAPEAAGGPSVFLFPPKPKDTLMISRTPEVTCVVVSVSHEDPEVKFNWYVDGVEVHNAKTKPREEQYNSTYRVVSVLTVLHQDWLNGKEYKCKVSNKALPAPIEKTISKAKGQPREPQVYVYPPSREEMTKNQVSLTCLVKGFYPSDIAVEWESNGQPENNYKTTPPVLDSDGSFALVSKLTVDKSRWQQGNVFSCSVMHEALHNHYTQKSLSLSPG

SEQ ID NO: 142 - protein, 478 aa, Artificial Sequence
  source: /note="Description of Artificial Sequence: Synthetic polypeptide"
QVQLVQSGAEVKKPGSSVKVSCKASGYTFTRSTMHWVRQAPGQGLEWMGYINPSSAYTNYAQKFQGRVTLTADKSTSTAYMELSSLRSEDTAVYYCASPQVHYDYQGFPYWGQGTLVTVSSGGSEGKSSGSGSESKSTGGSEIVLTQSPATLSASPGERVTLSCSASSSVSYMNWYQQKPGQAPRRWIYDSSKLASGVPARFSGSGSGRDYTLTISSLEPEDFAVYYCQQWSRNPPTFGGGTKVEIKEPKSSDKTHTCPPCPAPEAAGGPSVFLFPPKPKDTLMISRTPEVTCVVVSVSHEDPEVKFNWYVDGVEVHNAKTKPREEQYNSTYRVVSVLTVLHQDWLNGKEYKCKVSNKALPAPIEKTISKAKGQPREPQVYVYPPSREEMTKNQVSLTCLVKGFYPSDIAVEWESNGQPENNYKTTPPVLDSDGSFALVSKLTVDKSRWQQGNVFSCSVMHEALHNHYTQKSLSLSPG

SEQ ID NO: 143 - protein, 478 aa, Artificial Sequence
  source: /note="Description of Artificial Sequence: Synthetic polypeptide"
QVQLVQSGAEVKKPGSSVKVSCKASGYTFTRSTMHWVRQAPGQGLEWMGYINPSSAYTNYAQKFQGRVTLTADKSTSTAYMELSSLRSEDTAVYYCASPQVHYDYGGFPYWGQGTLVTVSSGGSEGKSSGSGSESKSTGGSEIVLTQSPATLSASPGERVTLSCSASSSVSYMNWYQQKPGQAPRRWIYDSSKLASGVPARFSGSGSGRDYTLTISSLEPEDFAVYYCQQWSRNPPTFGGGTKVEIKEPKSSDKTHTCPPCPAPEAAGGPSVFLFPPKPKDTLMISRTPEVTCVVVSVSHEDPEVKFNWYVDGVEVHNAKTKPREEQYNSTYRVVSVLTVLHQDWLNGKEYKCKVSNKALPAPIEKTISKAKGQPREPQVYVYPPSREEMTKNQVSLTCLVKGFYPSDIAVEWESNGQPENNYKTTPPVLDSDGSFALVSKLTVDKSRWQQGNVFSCSVMHEALHNHYTQKSLSLSPG

SEQ ID NO: 144 - protein, 478 aa, Artificial Sequence
  source: /note="Description of Artificial Sequence: Synthetic polypeptide"
QVQLVQSGAEVKKPGSSVKVSCKASGYTFTRSTMHWVRQAPGQGLEWMGYINPSSAYTNYAQKFQGRVTLTADKSTSTAYMELSSLRSEDTAVYYCASPQVHYDYAGFPYWGQGTLVTVSSGGSEGKSSGSGSESKSTGGSEIVLTQSPATLSASPGERVTLSCSASSSVSYMNWYQQKPGQAPRRWIYDSSKLASGVPARFSGSGSGRDYTLTISSLEPEDFAVYYCQQWSRNPPTFGGGTKVEIKEPKSSDKTHTCPPCPAPEAAGGPSVFLFPPKPKDTLMISRTPEVTCVVVSVSHEDPEVKFNWYVDGVEVHNAKTKPREEQYNSTYRVVSVLTVLHQDWLNGKEYKCKVSNKALPAPIEKTISKAKGQPREPQVYVYPPSREEMTKNQVSLTCLVKGFYPSDIAVEWESNGQPENNYKTTPPVLDSDGSFALVSKLTVDKSRWQQGNVFSCSVMHEALHNHYTQKSLSLSPG

SEQ ID NO: 145 - protein, 478 aa, Artificial Sequence
  source: /note="Description of Artificial Sequence: Synthetic polypeptide"
QVQLVQSGAEVKKPGSSVKVSCKASGYTFTRSTMHWVRQAPGQGLEWMGYINPSSAYTNYAQKFQGRVTLTADKSTSTAYMELSSLRSEDTAVYYCASPQVHYDYNGFPYWGQGTLVTVSSGGSEGKSSGSGSESKSTGGSEIVLTQSPATLSASPGERVTLSCSASSSVSYMNWYQQKPGQAPRRWIYDSSKLASGVPARFSGSGSGRDYTLTISSLEPEDFAVYYCQQWSRNPPTFGGGTKVEIKEPKSSDKTHTCPPCPAPEAAGGPSVFLFPPKPKDTLMISRTPEVTCVVVSVSHEDPEVKFNWYVDGVEVHNAKTKPREEQYNSTYRVVSVLTVLHQDWLNGKEYKCKVSNKALPAPIEKTISKAKGQPREPQVYVYPPSREEMTKNQVSLTCLVKGFYPSDIAVEWESNGQPENNYKTTPPVLDSDGSFALVSKLTVDKSRWQQGNVFSCSVMHEALHNHYTQKSLSLSPG

SEQ ID NO: 146 - protein, 478 aa, Artificial Sequence
  source: /note="Description of Artificial Sequence: Synthetic polypeptide"
QVQLVQSGAEVKKPGSSVKVSCKASGYTFTRSTMHWVKQAPGQGLEWMGYINPSSAYTNYNQKFQGRVTLTADKSTSTAYMELSSLRSEDTAVYYCASPQVHYDYSGFPYWGQGTLVTVSSGGSEGKSSGSGSESKSTGGSEIVLTQSPATLSASPGERVTLSCSASSSVSYMNWYQQKPGQAPRRLIYDSSKLASGVPARFSGSGSGRDYTLTISSLEPEDFAVYYCQQWSRNPPTFGGGTKVEIKEPKSSDKTHTCPPCPAPEAAGGPSVFLFPPKPKDTLMISRTPEVTCVVVSVSHEDPEVKFNWYVDGVEVHNAKTKPREEQYNSTYRVVSVLTVLHQDWLNGKEYKCKVSNKALPAPIEKTISKAKGQPREPQVYVYPPSREEMTKNQVSLTCLVKGFYPSDIAVEWESNGQPENNYKTTPPVLDSDGSFALVSKLTVDKSRWQQGNVFSCSVMHEALHNHYTQKSLSLSPG

SEQ ID NO: 147 - protein, 478 aa, Artificial Sequence
  source: /note="Description of Artificial Sequence: Synthetic polypeptide"
QVQLVQSGAEVKKPGSSVKVSCKASGYTFTRSTMHWVKQAPGQGLEWMGYINPSSAYTNYNQKFQGRVTLTADKSTSTAYMELSSLRSEDTAVYYCASPQVHYDYQGFPYWGQGTLVTVSSGGSEGKSSGSGSESKSTGGSEIVLTQSPATLSASPGERVTLSCSASSSVSYMNWYQQKPGQAPRRLIYDSSKLASGVPARFSGSGSGRDYTLTISSLEPEDFAVYYCQQWSRNPPTFGGGTKVEIKEPKSSDKTHTCPPCPAPEAAGGPSVFLFPPKPKDTLMISRTPEVTCVVVSVSHEDPEVKFNWYVDGVEVHNAKTKPREEQYNSTYRVVSVLTVLHQDWLNGKEYKCKVSNKALPAPIEKTISKAKGQPREPQVYVYPPSREEMTKNQVSLTCLVKGFYPSDIAVEWESNGQPENNYKTTPPVLDSDGSFALVSKLTVDKSRWQQGNVFSCSVMHEALHNHYTQKSLSLSPG

SEQ ID NO: 148 - protein, 478 aa, Artificial Sequence
  source: /note="Description of Artificial Sequence: Synthetic polypeptide"
QVQLVQSGAEVKKPGSSVKVSCKASGYTFTRSTMHWVKQAPGQGLEWMGYINPSSAYTNYNQKFQGRVTLTADKSTSTAYMELSSLRSEDTAVYYCASPQVHYDYGGFPYWGQGTLVTVSSGGSEGKSSGSGSESKSTGGSEIVLTQSPATLSASPGERVTLSCSASSSVSYMNWYQQKPGQAPRRLIYDSSKLASGVPARFSGSGSGRDYTLTISSLEPEDFAVYYCQQWSRNPPTFGGGTKVEIKEPKSSDKTHTCPPCPAPEAAGGPSVFLFPPKPKDTLMISRTPEVTCVVVSVSHEDPEVKFNWYVDGVEVHNAKTKPREEQYNSTYRVVSVLTVLHQDWLNGKEYKCKVSNKALPAPIEKTISKAKGQPREPQVYVYPPSREEMTKNQVSLTCLVKGFYPSDIAVEWESNGQPENNYKTTPPVLDSDGSFALVSKLTVDKSRWQQGNVFSCSVMHEALHNHYTQKSLSLSPG

SEQ ID NO: 149 - protein, 478 aa, Artificial Sequence
  source: /note="Description of Artificial Sequence: Synthetic polypeptide"
QVQLVQSGAEVKKPGSSVKVSCKASGYTFTRSTMHWVKQAPGQGLEWMGYINPSSAYTNYNQKFQGRVTLTADKSTSTAYMELSSLRSEDTAVYYCASPQVHYDYAGFPYWGQGTLVTVSSGGSEGKSSGSGSESKSTGGSEIVLTQSPATLSASPGERVTLSCSASSSVSYMNWYQQKPGQAPRRLIYDSSKLASGVPARFSGSGSGRDYTLTISSLEPEDFAVYYCQQWSRNPPTFGGGTKVEIKEPKSSDKTHTCPPCPAPEAAGGPSVFLFPPKPKDTLMISRTPEVTCVVVSVSHEDPEVKFNWYVDGVEVHNAKTKPREEQYNSTYRVVSVLTVLHQDWLNGKEYKCKVSNKALPAPIEKTISKAKGQPREPQVYVYPPSREEMTKNQVSLTCLVKGFYPSDIAVEWESNGQPENNYKTTPPVLDSDGSFALVSKLTVDKSRWQQGNVFSCSVMHEALHNHYTQKSLSLSPG

SEQ ID NO: 150 - protein, 478 aa, Artificial Sequence
  source: /note="Description of Artificial Sequence: Synthetic polypeptide"
QVQLVQSGAEVKKPGSSVKVSCKASGYTFTRSTMHWVKQAPGQGLEWMGYINPSSAYTNYNQKFQGRVTLTADKSTSTAYMELSSLRSEDTAVYYCASPQVHYDYNGFPYWGQGTLVTVSSGGSEGKSSGSGSESKSTGGSEIVLTQSPATLSASPGERVTLSCSASSSVSYMNWYQQKPGQAPRRLIYDSSKLASGVPARFSGSGSGRDYTLTISSLEPEDFAVYYCQQWSRNPPTFGGGTKVEIKEPKSSDKTHTCPPCPAPEAAGGPSVFLFPPKPKDTLMISRTPEVTCVVVSVSHEDPEVKFNWYVDGVEVHNAKTKPREEQYNSTYRVVSVLTVLHQDWLNGKEYKCKVSNKALPAPIEKTISKAKGQPREPQVYVYPPSREEMTKNQVSLTCLVKGFYPSDIAVEWESNGQPENNYKTTPPVLDSDGSFALVSKLTVDKSRWQQGNVFSCSVMHEALHNHYTQKSLSLSPG

SEQ ID NO: 151 - protein, 478 aa, Artificial Sequence
  source: /note="Description of Artificial Sequence: Synthetic polypeptide"
QVQLVQSGAEVKKPGSSVKVSCKASGYTFTRSTMHWVKQAPGQGLEWIGYINPSSAYTNYNQKFQGRVTLTADKSTSTAYMELSSLRSEDTAVYYCASPQVHYDYSGFPYWGQGTLVTVSSGGSEGKSSGSGSESKSTGGSEIVLTQSPATLSASPGERVTLSCSASSSVSYMNWYQQKPGQAPRRWIYDSSKLASGVPARFSGSGSGRDYTLTISSLEPEDFAVYYCQQWSRNPPTFGGGTKVEIKEPKSSDKTHTCPPCPAPEAAGGPSVFLFPPKPKDTLMISRTPEVTCVVVSVSHEDPEVKFNWYVDGVEVHNAKTKPREEQYNSTYRVVSVLTVLHQDWLNGKEYKCKVSNKALPAPIEKTISKAKGQPREPQVYVYPPSREEMTKNQVSLTCLVKGFYPSDIAVEWESNGQPENNYKTTPPVLDSDGSFALVSKLTVDKSRWQQGNVFSCSVMHEALHNHYTQKSLSLSPG

SEQ ID NO: 152 - protein, 478 aa, Artificial Sequence
  source: /note="Description of Artificial Sequence: Synthetic polypeptide"
QVQLVQSGAEVKKPGSSVKVSCKASGYTFTRSTMHWVKQAPGQGLEWIGYINPSSAYTNYNQKFQGRVTLTADKSTSTAYMELSSLRSEDTAVYYCASPQVHYDYGGFPYWGQGTLVTVSSGGSEGKSSGSGSESKSTGGSEIVLTQSPATLSASPGERVTLSCSASSSVSYMNWYQQKPGQAPRRWIYDSSKLASGVPARFSGSGSGRDYTLTISSLEPEDFAVYYCQQWSRNPPTFGGGTKVEIKEPKSSDKTHTCPPCPAPEAAGGPSVFLFPPKPKDTLMISRTPEVTCVVVSVSHEDPEVKFNWYVDGVEVHNAKTKPREEQYNSTYRVVSVLTVLHQDWLNGKEYKCKVSNKALPAPIEKTISKAKGQPREPQVYVYPPSREEMTKNQVSLTCLVKGFYPSDIAVEWESNGQPENNYKTTPPVLDSDGSFALVSKLTVDKSRWQQGNVFSCSVMHEALHNHYTQKSLSLSPG

SEQ ID NO: 153 - protein, 478 aa, Artificial Sequence
  source: /note="Description of Artificial Sequence: Synthetic polypeptide"
QVQLVQSGAEVKKPGSSVKVSCKASGYTFTRSTMHWVKQAPGQGLEWIGYINPSSAYTNYNQKFQGRVTLTADKSTSTAYMELSSLRSEDTAVYYCASPQVHYDYAGFPYWGQGTLVTVSSGGSEGKSSGSGSESKSTGGSEIVLTQSPATLSASPGERVTLSCSASSSVSYMNWYQQKPGQAPRRWIYDSSKLASGVPARFSGSGSGRDYTLTISSLEPEDFAVYYCQQWSRNPPTFGGGTKVEIKEPKSSDKTHTCPPCPAPEAAGGPSVFLFPPKPKDTLMISRTPEVTCVVVSVSHEDPEVKFNWYVDGVEVHNAKTKPREEQYNSTYRVVSVLTVLHQDWLNGKEYKCKVSNKALPAPIEKTISKAKGQPREPQVYVYPPSREEMTKNQVSLTCLVKGFYPSDIAVEWESNGQPENNYKTTPPVLDSDGSFALVSKLTVDKSRWQQGNVFSCSVMHEALHNHYTQKSLSLSPG

SEQ ID NO: 154 - protein, 478 aa, Artificial Sequence
  source: /note="Description of Artificial Sequence: Synthetic polypeptide"
QVQLVQSGAEVKKPGSSVKVSCKASGYTFTRSTMHWVKQAPGQGLEWIGYINPSSAYTNYNQKFQGRVTLTADKSTSTAYMELSSLRSEDTAVYYCASPQVHYDYNGFPYWGQGTLVTVSSGGSEGKSSGSGSESKSTGGSEIVLTQSPATLSASPGERVTLSCSASSSVSYMNWYQQKPGQAPRRWIYDSSKLASGVPARFSGSGSGRDYTLTISSLEPEDFAVYYCQQWSRNPPTFGGGTKVEIKEPKSSDKTHTCPPCPAPEAAGGPSVFLFPPKPKDTLMISRTPEVTCVVVSVSHEDPEVKFNWYVDGVEVHNAKTKPREEQYNSTYRVVSVLTVLHQDWLNGKEYKCKVSNKALPAPIEKTISKAKGQPREPQVYVYPPSREEMTKNQVSLTCLVKGFYPSDIAVEWESNGQPENNYKTTPPVLDSDGSFALVSKLTVDKSRWQQGNVFSCSVMHEALHNHYTQKSLSLSPG

SEQ ID NO: 155 - protein, 478 aa, Artificial Sequence
  source: /note="Description of Artificial Sequence: Synthetic polypeptide"
EIVLTQSPATLSASPGERVTLSCSASSSVSYMNWYQQKPGQAPRRWIYDSSKLASGVPARFSGSGSGRDYTLTISSLEPEDFAVYYCQQWSRNPPTFGGGTKVEIKGGSEGKSSGSGSESKSTGGSQVQLVQSGAEVKKPGSSVKVSCKASGYTFTRSTMHWVKQAPGQGLEWIGYINPSSAYTNYNQKFQGRVTLTADKSTSTAYMELSSLRSEDTAVYYCASPQVHYDYQGFPYWGQGTLVTVSSEPKSSDKTHTCPPCPAPEAAGGPSVFLFPPKPKDTLMISRTPEVTCVVVSVSHEDPEVKFNWYVDGVEVHNAKTKPREEQYNSTYRVVSVLTVLHQDWLNGKEYKCKVSNKALPAPIEKTISKAKGQPREPQVYVYPPSREEMTKNQVSLTCLVKGFYPSDIAVEWESNGQPENNYKTTPPVLDSDGSFALVSKLTVDKSRWQQGNVFSCSVMHEALHNHYTQKSLSLSPG

SEQ ID NO: 156 - protein, 478 aa, Artificial Sequence
  source: /note="Description of Artificial Sequence: Synthetic polypeptide"
QVQLVQSGAEVKKPGSSVKVSCKASGYTFTRSTMHWVKQAPGQGLEWIGYINPSSAYTNYNQKFQGRVTLTADKSTSTAYMELSSLRSEDTAVYYCASPQVHYDYQGFPYWGQGTLVTVSSGGSEGKSSGSGSESKSTGGSEIVLTQSPATLSASPGERVTLSCSASSSVSYMNWYQQKPGQAPRRWIYDSSKLASGVPARFSGSGSGRDYTLTISSLEPEDFAVYYCQQWSRNPPTFGGGTKVEIKEPKSSDKTHTCPPCPAPEAAGGPSVFLFPPKPKDTLMISRTPEVTCVVVSVSHEDPEVKFNWYVDGVEVHNAKTKPREEQYNSTYRVVSVLTVLHQDWLNGKEYKCKVSNKALPAPIEKTISKAKGQPREPQVYVYPPSREEMTKNQVSLTCLVKGFYPSDIAVEWESNGQPENNYKTTPPVLDSDGSFALVSKLTVDKSRWQQGNVFSCSVMHEALHNHYTQKSLSLSPG

SEQ ID NO: 157 - protein, 478 aa, Artificial Sequence
  source: /note="Description of Artificial Sequence: Synthetic polypeptide"
QVQLVQSGAEVKKPGSSVKVSCKASGYTFTRSTMHWVKQAPGQGLEWIGYINPSSAYTNYNQKFQGRVTLTADKSTSTAYMELSSLRSEDTAVYYCASPQVHYDYQGFPYWGQGTLVTVSSGGSEGKSSGSGSESKSTGGSEIVLTQSPATLSASPGERVTLSCSASSSVSYMNWYQQKPGQSPRRWIYDSSKLASGVPARFSGSGSGRDYTLTISSLEPEDFAVYYCQQWSRNPPTFGGGTKVEIKEPKSSDKTHTCPPCPAPEAAGGPSVFLFPPKPKDTLMISRTPEVTCVVVSVSHEDPEVKFNWYVDGVEVHNAKTKPREEQYNSTYRVVSVLTVLHQDWLNGKEYKCKVSNKALPAPIEKTISKAKGQPREPQVYVYPPSREEMTKNQVSLTCLVKGFYPSDIAVEWESNGQPENNYKTTPPVLDSDGSFALVSKLTVDKSRWQQGNVFSCSVMHEALHNHYTQKSLSLSPG

SEQ ID NO: 158 - DNA, 1434 bp, Artificial Sequence
  source: /note="Description of Artificial Sequence: Synthetic polynucleotide"
gagattgtactgacacagtccccagcaaccttgtccgcttctcccggcgaaagggtcactctctcctgctccgctagttcttcagtgtcatatatgaattggtaccaacaaaagccaggtcaggctccaagaagatggatttacgattcctccaagttggcttctggtgtccctgcacgatttagcgggtcagggtcagggcgcgattacacactcacaattagtagtctcgaacccgaggactttgccgtatattactgtcagcaatggagtcggaatcccccaactttcggcgggggaacaaaagtagaaataaaaggcggctccgagggcaagagcagcggcagcggcagcgagagcaagagcaccggcggcagccaagtgcagttggtccagtcaggcgcagaagtgaagaagcccggctcaagcgtcaaggtatcatgtaaggcttctggatatactttcacccgaagcacaatgcactgggttcgccaggcccctggacagggtcttgagtggatggggtatatcaacccatcctcagcatatactaactatgctcagaagtttcaggggcgtgtcactttgaccgccgataagtccacaagcaccgcttatatggaactgtcttcattgcgctctgaagacactgcagtgtactattgcgccagcccacaggtccactacgactattctggatttccatactgggggcaggggaccttggtgactgtaagctctgagcccaaatctagcgacaaaactcacacatgtccaccgtgcccagcacctgaagcagcagggggaccgtcagtcttcctcttccccccaaaacccaaggacaccctcatgatctcccggacccctgaggtcacatgcgtggtggtgagcgtgagccacgaagaccctgaggtcaagttcaactggtacgtggacggcgtggaggtgcataatgccaagacaaagccgcgggaggagcagtacaacagcacgtaccgtgtggtcagcgtcctcaccgtcctgcaccaggactggctgaatggcaaggagtacaagtgcaaggtctccaacaaagccctcccagcccccatcgagaaaaccatctccaaagccaaagggcagccccgagaaccacaggtgtacgtgtaccccccatcccgggaggagatgaccaagaaccaggtcagcctgacctgcctggtcaaaggcttctatcccagcgacatcgccgtggagtgggagagcaatgggcagccggagaacaactacaagaccacgcctcccgtgctggactccgacggctccttcgccctcgtgagcaagctcaccgtggacaagtctagatggcagcaggggaacgtcttctcatgctccgtgatgcatgaggctctgcacaaccactacacgcagaagagcctctccctgtctccgggt

SEQ ID NO: 159 - DNA, 742 bp, Artificial Sequence
  source: /note="Description of Artificial Sequence: Synthetic polynucleotide"
gagattgtactgacacagtccccagcaaccttgtccgcttctcccggcgaaagggtcactctctcctgctccgctagttcttcagtgtcatatatgaattggtaccaacaaaagccaggtcaggctccaagaagatggatttacgattcctccaagttggcttctggtgtccctgcacgatttagcgggtcagggtcagggcgcgattacacactcacaattagtagtctcgaacccgaggactttgccgtatattactgtcagcaatggagtcggaatcccccaactttcggcgggggaacaaaagtagaaataaaaggcggctccgagggcaagagcagcggcagcggcagcgagagcaagagcaccggcggcagccaagtgcagttggtccagtcaggcgcagaagtgaagaagcccggctcaagcgtcaaggtatcatgtaaggcttctggatatactttcacccgaagcacaatgcactgggttcgccaggcccctggacagggtcttgagtggatggggtatatcaacccatcctcagcatatactaactatgctcagaagtttcaggggcgtgtcactttgaccgccgataagtccacaagcaccgcttatatggaactgtcttcattgcgctctgaagacactgcagtgtactattgcgccagcccacaggtccactacgactattctggatttccatactgggggcaggggaccttggtgactgtaagctctg

SEQ ID NO: 160 - DNA, 1434 bp, Artificial Sequence
  source: /note="Description of Artificial Sequence: Synthetic polynucleotide"
gagatcgtactgacccaaagtcccgccactctctctgctagcccaggcgagagagttaccttgtcttgctctgctagttcaagtgtcagttatatgaactggtatcagcagaagccaggacaggcacctcgaagatggatatatgactcctccaaactcgcatcaggcgtaccagcacgcttttctgggagcggtagtggtagggattatacactcaccatctctagtttggaaccagaagatttcgctgtgtactattgccagcagtggagccgcaaccctcctaccttcggcggtgggacaaaggtagaaataaaaggcggctccgagggcaagagcagcggcagcggcagcgagagcaagagcaccggcggcagccaagtgcagttggttcaatccggcgctgaagtgaagaaacctgggtcatctgtcaaagtatcctgtaaagcctctgggtacacttttacacgtagcaccatgcactgggtccgtcaagcccctgggcaaggccttgagtggatgggttatataaacccatcctccgcatacacaaattacgctcaaaaatttcaagggcgagtcactctcactgccgataaatccacttcaactgcctatatggagcttagttcattgcgatcagaagatactgcagtctattattgtgcatcacctcaggtccattacgactaccaagggttcccctactggggacaggggactttggtaactgtgtcttctgagcccaaatctagcgacaaaactcacacatgtccaccgtgcccagcacctgaagcagcagggggaccgtcagtcttcctcttccccccaaaacccaaggacaccctcatgatctcccggacccctgaggtcacatgcgtggtggtgagcgtgagccacgaagaccctgaggtcaagttcaactggtacgtggacggcgtggaggtgcataatgccaagacaaagccgcgggaggagcagtacaacagcacgtaccgtgtggtcagcgtcctcaccgtcctgcaccaggactggctgaatggcaaggagtacaagtgcaaggtctccaacaaagccctcccagcccccatcgagaaaaccatctccaaagccaaagggcagccccgagaaccacaggtgtacgtgtaccccccatcccgggaggagatgaccaagaaccaggtcagcctgacctgcctggtcaaaggcttctatcccagcgacatcgccgtggagtgggagagcaatgggcagccggagaacaactacaagaccacgcctcccgtgctggactccgacggctccttcgccctcgtgagcaagctcaccgtggacaagtctagatggcagcaggggaacgtcttctcatgctccgtgatgcatgaggctctgcacaaccactacacgcagaagagcctctccctgtctccgggt

SEQ ID NO: 161 - DNA, 742 bp, Artificial Sequence
  source: /note="Description of Artificial Sequence: Synthetic polynucleotide"
gagatcgtactgacccaaagtcccgccactctctctgctagcccaggcgagagagttaccttgtcttgctctgctagttcaagtgtcagttatatgaactggtatcagcagaagccaggacaggcacctcgaagatggatatatgactcctccaaactcgcatcaggcgtaccagcacgcttttctgggagcggtagtggtagggattatacactcaccatctctagtttggaaccagaagatttcgctgtgtactattgccagcagtggagccgcaaccctcctaccttcggcggtgggacaaaggtagaaataaaaggcggctccgagggcaagagcagcggcagcggcagcgagagcaagagcaccggcggcagccaagtgcagttggttcaatccggcgctgaagtgaagaaacctgggtcatctgtcaaagtatcctgtaaagcctctgggtacacttttacacgtagcaccatgcactgggtccgtcaagcccctgggcaaggccttgagtggatgggttatataaacccatcctccgcatacacaaattacgctcaaaaatttcaagggcgagtcactctcactgccgataaatccacttcaactgcctatatggagcttagttcattgcgatcagaagatactgcagtctattattgtgcatcacctcaggtccattacgactaccaagggttcccctactggggacaggggactttggtaactgtgtcttctg

SEQ ID NO: 162 - DNA, 1434 bp, Artificial Sequence
  source: /note="Description of Artificial Sequence: Synthetic polynucleotide"
gagatcgtattgacacaatcacccgccacattgtcagctagccccggtgagcgcgtcacactttcttgtagtgcatcaagtagcgtttcttacatgaattggtatcagcagaaaccaggacaagcaccacggcgatggatatacgattctagcaaactcgccagtggcgtccccgctcgattctccgggtctggcagtggtagagattatacactcactatcagttctctggaaccagaagacttcgcagtctattactgtcaacaatggtcacggaatccccccacattcggtggtggcaccaaggttgaaattaagggcggctccgagggcaagagcagcggcagcggcagcgagagcaagagcaccggcggcagccaagttcagcttgtgcagagcggggcagaggtgaagaaacccggatcaagcgtcaaagtttcttgtaaagctagtggatatactttcacacgctcaactatgcactgggtgagacaagctcctggtcagggcctggagtggatggggtacataaatccctccagtgcatatactaactatgctcaaaagttccaaggccgcgtaactctcactgccgataagtccaccagcactgcctacatggaactgtctagtttgcgatccgaggacaccgccgtgtactactgtgcttcacctcaagtacattatgactacgggggatttccctactggggccaaggtactttggtcacagtctcaagcgagcccaaatctagcgacaaaactcacacatgtccaccgtgcccagcacctgaagcagcagggggaccgtcagtcttcctcttccccccaaaacccaaggacaccctcatgatctcccggacccctgaggtcacatgcgtggtggtgagcgtgagccacgaagaccctgaggtcaagttcaactggtacgtggacggcgtggaggtgcataatgccaagacaaagccgcgggaggagcagtacaacagcacgtaccgtgtggtcagcgtcctcaccgtcctgcaccaggactggctgaatggcaaggagtacaagtgcaaggtctccaacaaagccctcccagcccccatcgagaaaaccatctccaaagccaaagggcagccccgagaaccacaggtgtacgtgtaccccccatcccgggaggagatgaccaagaaccaggtcagcctgacctgcctggtcaaaggcttctatcccagcgacatcgccgtggagtgggagagcaatgggcagccggagaacaactacaagaccacgcctcccgtgctggactccgacggctccttcgccctcgtgagcaagctcaccgtggacaagtctagatggcagcaggggaacgtcttctcatgctccgtgatgcatgaggctctgcacaaccactacacgcagaagagcctctccctgtctccgggt

SEQ ID NO: 163 - DNA, 742 bp, Artificial Sequence
  source: /note="Description of Artificial Sequence: Synthetic polynucleotide"
gagatcgtattgacacaatcacccgccacattgtcagctagccccggtgagcgcgtcacactttcttgtagtgcatcaagtagcgtttcttacatgaattggtatcagcagaaaccaggacaagcaccacggcgatggatatacgattctagcaaactcgccagtggcgtccccgctcgattctccgggtctggcagtggtagagattatacactcactatcagttctctggaaccagaagacttcgcagtctattactgtcaacaatggtcacggaatccccccacattcggtggtggcaccaaggttgaaattaagggcggctccgagggcaagagcagcggcagcggcagcgagagcaagagcaccggcggcagccaagttcagcttgtgcagagcggggcagaggtgaagaaacccggatcaagcgtcaaagtttcttgtaaagctagtggatatactttcacacgctcaactatgcactgggtgagacaagctcctggtcagggcctggagtggatggggtacataaatccctccagtgcatatactaactatgctcaaaagttccaaggccgcgtaactctcactgccgataagtccaccagcactgcctacatggaactgtctagtttgcgatccgaggacaccgccgtgtactactgtgcttcacctcaagtacattatgactacgggggatttccctactggggccaaggtactttggtcacagtctcaagcg

SEQ ID NO: 164 - DNA, 1434 bp, Artificial Sequence
  source: /note="Description of Artificial Sequence: Synthetic polynucleotide"
gaaatagtgctgacccagagccccgctaccctttctgcaagtcctggggaacgtgttacattgtcttgtagcgcttcttcatcagtctcctatatgaattggtatcaacaaaaaccaggacaagctcctcggcggtggatctacgacagttccaaacttgcctctggtgtgcctgctcggtttagtgggtctggaagtggacgagattatactctgaccatcagttccttggaacccgaggattttgctgtttattactgccaacaatggagtagaaaccctccaacctttggaggtggaactaaggtcgagataaagggcggctccgagggcaagagcagcggcagcggcagcgagagcaagagcaccggcggcagccaagtgcaattggtccaaagtggagctgaagtaaaaaaacccggctcctctgtgaaggtcagttgcaaagcctcagggtacacctttactaggtcaacaatgcactgggtgcgacaagctcccggtcagggtttggagtggatgggatacataaacccctcatcagcctacacaaattatgcacaaaaatttcagggtcgggttacactcaccgccgacaaatccacttccactgcttatatggaactttcctctctccgcagtgaggacacagcagtgtactattgtgcctcccctcaagtgcattatgactacgctggtttcccttactggggacaaggtactctggttacagtttcttccgagcccaaatctagcgacaaaactcacacatgtccaccgtgcccagcacctgaagcagcagggggaccgtcagtcttcctcttccccccaaaacccaaggacaccctcatgatctcccggacccctgaggtcacatgcgtggtggtgagcgtgagccacgaagaccctgaggtcaagttcaactggtacgtggacggcgtggaggtgcataatgccaagacaaagccgcgggaggagcagtacaacagcacgtaccgtgtggtcagcgtcctcaccgtcctgcaccaggactggctgaatggcaaggagtacaagtgcaaggtctccaacaaagccctcccagcccccatcgagaaaaccatctccaaagccaaagggcagccccgagaaccacaggtgtacgtgtaccccccatcccgggaggagatgaccaagaaccaggtcagcctgacctgcctggtcaaaggcttctatcccagcgacatcgccgtggagtgggagagcaatgggcagccggagaacaactacaagaccacgcctcccgtgctggactccgacggctccttcgccctcgtgagcaagctcaccgtggacaagtctagatggcagcaggggaacgtcttctcatgctccgtgatgcatgaggctctgcacaaccactacacgcagaagagcctctccctgtctccgggt

SEQ ID NO: 165 - DNA, 742 bp, Artificial Sequence
  source: /note="Description of Artificial Sequence: Synthetic polynucleotide"
gaaatagtgctgacccagagccccgctaccctttctgcaagtcctggggaacgtgttacattgtcttgtagcgcttcttcatcagtctcctatatgaattggtatcaacaaaaaccaggacaagctcctcggcggtggatctacgacagttccaaacttgcctctggtgtgcctgctcggtttagtgggtctggaagtggacgagattatactctgaccatcagttccttggaacccgaggattttgctgtttattactgccaacaatggagtagaaaccctccaacctttggaggtggaactaaggtcgagataaagggcggctccgagggcaagagcagcggcagcggcagcgagagcaagagcaccggcggcagccaagtgcaattggtccaaagtggagctgaagtaaaaaaacccggctcctctgtgaaggtcagttgcaaagcctcagggtacacctttactaggtcaacaatgcactgggtgcgacaagctcccggtcagggtttggagtggatgggatacataaacccctcatcagcctacacaaattatgcacaaaaatttcagggtcgggttacactcaccgccgacaaatccacttccactgcttatatggaactttcctctctccgcagtgaggacacagcagtgtactattgtgcctcccctcaagtgcattatgactacgctggtttcccttactggggacaaggtactctggttacagtttcttccg

SEQ ID NO: 166 - DNA, 1434 bp, Artificial Sequence
  source: /note="Description of Artificial Sequence: Synthetic polynucleotide"
gaaatcgttctcacacagagccctgcaacattgtcagcttcacccggtgaacgagtaacattgtcctgttctgcctcaagtagtgtgagctatatgaattggtatcaacaaaaaccagggcaggcccctagaaggtggatctatgattcaagcaaactggcatccggcgtccctgcccgctttagtggaagcggttcaggaagggactatactcttactatctccagccttgaacctgaagattttgcagtctactactgccaacaatggtctaggaatccccccacttttggtggagggaccaaagttgagatcaaaggcggctccgagggcaagagcagcggcagcggcagcgagagcaagagcaccggcggcagccaggtacaactcgtgcaaagtggtgctgaagtgaagaaacctggatcaagcgtcaaggtatcctgtaaagcatcaggatacaccttcacacgcagtactatgcattgggtgcgtcaagcccccggacagggcctggaatggatgggctacataaacccttcttccgcctacaccaattatgcccaaaagttccagggaagggtgactctgactgctgataaaagtactagcaccgcatacatggaactgtcttcactgagaagcgaggacaccgccgtctattattgtgcatccccccaagtccactatgattacaacggatttccttactggggccagggaaccttggtcaccgtgtcttccgagcccaaatctagcgacaaaactcacacatgtccaccgtgcccagcacctgaagcagcagggggaccgtcagtcttcctcttccccccaaaacccaaggacaccctcatgatctcccggacccctgaggtcacatgcgtggtggtgagcgtgagccacgaagaccctgaggtcaagttcaactggtacgtggacggcgtggaggtgcataatgccaagacaaagccgcgggaggagcagtacaacagcacgtaccgtgtggtcagcgtcctcaccgtcctgcaccaggactggctgaatggcaaggagtacaagtgcaaggtctccaacaaagccctcccagcccccatcgagaaaaccatctccaaagccaaagggcagccccgagaaccacaggtgtacgtgtaccccccatcccgggaggagatgaccaagaaccaggtcagcctgacctgcctggtcaaaggcttctatcccagcgacatcgccgtggagtgggagagcaatgggcagccggagaacaactacaagaccacgcctcccgtgctggactccgacggctccttcgccctcgtgagcaagctcaccgtggacaagtctagatggcagcaggggaacgtcttctcatgctccgtgatgcatgaggctctgcacaaccactacacgcagaagagcctctccctgtctccgggt

SEQ ID NO: 167 - DNA, 742 bp, Artificial Sequence
  source: /note="Description of Artificial Sequence: Synthetic polynucleotide"
gaaatcgttctcacacagagccctgcaacattgtcagcttcacccggtgaacgagtaacattgtcctgttctgcctcaagtagtgtgagctatatgaattggtatcaacaaaaaccagggcaggcccctagaaggtggatctatgattcaagcaaactggcatccggcgtccctgcccgctttagtggaagcggttcaggaagggactatactcttactatctccagccttgaacctgaagattttgcagtctactactgccaacaatggtctaggaatccccccacttttggtggagggaccaaagttgagatcaaaggcggctccgagggcaagagcagcggcagcggcagcgagagcaagagcaccggcggcagccaggtacaactcgtgcaaagtggtgctgaagtgaagaaacctggatcaagcgtcaaggtatcctgtaaagcatcaggatacaccttcacacgcagtactatgcattgggtgcgtcaagcccccggacagggcctggaatggatgggctacataaacccttcttccgcctacaccaattatgcccaaaagttccagggaagggtgactctgactgctgataaaagtactagcaccgcatacatggaactgtcttcactgagaagcgaggacaccgccgtctattattgtgcatccccccaagtccactatgattacaacggatttccttactggggccagggaaccttggtcaccgtgtcttccg

SEQ ID NO: 168 - DNA, 1434 bp, Artificial Sequence
  source: /note="Description of Artificial Sequence: Synthetic polynucleotide"
gagattgtactcacccagtctccagctacccttagtgcttcacctggtgagcgcgtgacattgtcctgctccgcaagctccagtgtttcatatatgaattggtaccaacaaaagcctgggcaagcaccacgccggctgatctacgacagctccaagctcgcaagcggtgtacctgctcgcttttccggcagcgggtcaggtcgagattatactctgaccatttcatcactcgaacccgaagactttgcagtgtattactgtcaacagtggagtaggaatccaccaacatttgggggtggcaccaaggttgagataaagggcggctccgagggcaagagcagcggcagcggcagcgagagcaagagcaccggcggcagccaagtgcaactcgtacaatctggcgctgaggttaagaaacctggtagctctgttaaagtgtcttgtaaagcatccgggtatacttttacccggtcaactatgcactgggtaaaacaagctcctggacaaggtttggagtggatgggttatataaatccctcctcagcatacactaactacaaccagaagttccaggggcgcgttaccctgactgccgataagagtacttcaactgcttatatggagctgtcatccctgcgtagcgaggacacagcagtatactactgcgccagtccacaggtacactacgattacagtggctttccatactgggggcagggcactctggtaacagtatctagtgagcccaaatctagcgacaaaactcacacatgtccaccgtgcccagcacctgaagcagcagggggaccgtcagtcttcctcttccccccaaaacccaaggacaccctcatgatctcccggacccctgaggtcacatgcgtggtggtgagcgtgagccacgaagaccctgaggtcaagttcaactggtacgtggacggcgtggaggtgcataatgccaagacaaagccgcgggaggagcagtacaacagcacgtaccgtgtggtcagcgtcctcaccgtcctgcaccaggactggctgaatggcaaggagtacaagtgcaaggtctccaacaaagccctcccagcccccatcgagaaaaccatctccaaagccaaagggcagccccgagaaccacaggtgtacgtgtaccccccatcccgggaggagatgaccaagaaccaggtcagcctgacctgcctggtcaaaggcttctatcccagcgacatcgccgtggagtgggagagcaatgggcagccggagaacaactacaagaccacgcctcccgtgctggactccgacggctccttcgccctcgtgagcaagctcaccgtggacaagtctagatggcagcaggggaacgtcttctcatgctccgtgatgcatgaggctctgcacaaccactacacgcagaagagcctctccctgtctccgggt

SEQ ID NO: 169 - DNA, 742 bp, Artificial Sequence
  source: /note="Description of Artificial Sequence: Synthetic polynucleotide"
gagattgtactcacccagtctccagctacccttagtgcttcacctggtgagcgcgtgacattgtcctgctccgcaagctccagtgtttcatatatgaattggtaccaacaaaagcctgggcaagcaccacgccggctgatctacgacagctccaagctcgcaagcggtgtacctgctcgcttttccggcagcgggtcaggtcgagattatactctgaccatttcatcactcgaacccgaagactttgcagtgtattactgtcaacagtggagtaggaatccaccaacatttgggggtggcaccaaggttgagataaagggcggctccgagggcaagagcagcggcagcggcagcgagagcaagagcaccggcggcagccaagtgcaactcgtacaatctggcgctgaggttaagaaacctggtagctctgttaaagtgtcttgtaaagcatccgggtatacttttacccggtcaactatgcactgggtaaaacaagctcctggacaaggtttggagtggatgggttatataaatccctcctcagcatacactaactacaaccagaagttccaggggcgcgttaccctgactgccgataagagtacttcaactgcttatatggagctgtcatccctgcgtagcgaggacacagcagtatactactgcgccagtccacaggtacactacgattacagtggctttccatactgggggcagggcactctggtaacagtatctagtg

SEQ ID NO: 170 - DNA, 1434 bp, Artificial Sequence
  source: /note="Description of Artificial Sequence: Synthetic polynucleotide"
gagatcgtgttgactcaaagtcctgcaaccctgtctgctagtccaggggagagggttactctcagttgttctgcaagcagtagcgtatcctacatgaactggtatcaacaaaagcctggtcaggcaccacggcggttgatatatgactcctccaagttggcctctggggtgcccgcaagattctccgggtccggctctggccgcgattacacactgactataagcagtctggaaccagaggattttgccgtttactactgccaacaatggagccgaaaccccccaacctttggaggtggcactaaggtagagataaagggcggctccgagggcaagagcagcggcagcggcagcgagagcaagagcaccggcggcagccaggtacagttggtccaaagtggcgcagaggtaaagaaaccaggttcttcagtcaaggtaagttgcaaggcatctggatatacatttacccgcagtactatgcattgggtcaaacaggctccaggacaggggcttgaatggatgggttacatcaacccatctagtgcctatacaaactataatcagaaatttcagggcagagtgactctgacagccgacaaatcaacctctacagcatatatggagttgtcctctctccgtagtgaagatactgccgtctactattgtgcaagcccccaagtccactatgattatcagggtttcccttactgggggcagggtactttggttaccgtttcatccgagcccaaatctagcgacaaaactcacacatgtccaccgtgcccagcacctgaagcagcagggggaccgtcagtcttcctcttccccccaaaacccaaggacaccctcatgatctcccggacccctgaggtcacatgcgtggtggtgagcgtgagccacgaagaccctgaggtcaagttcaactggtacgtggacggcgtggaggtgcataatgccaagacaaagccgcgggaggagcagtacaacagcacgtaccgtgtggtcagcgtcctcaccgtcctgcaccaggactggctgaatggcaaggagtacaagtgcaaggtctccaacaaagccctcccagcccccatcgagaaaaccatctccaaagccaaagggcagccccgagaaccacaggtgtacgtgtaccccccatcccgggaggagatgaccaagaaccaggtcagcctgacctgcctggtcaaaggcttctatcccagcgacatcgccgtggagtgggagagcaatgggcagccggagaacaactacaagaccacgcctcccgtgctggactccgacggctccttcgccctcgtgagcaagctcaccgtggacaagtctagatggcagcaggggaacgtcttctcatgctccgtgatgcatgaggctctgcacaaccactacacgcagaagagcctctccctgtctccgggt

SEQ ID NO: 171 - DNA, 742 bp, Artificial Sequence
  source: /note="Description of Artificial Sequence: Synthetic polynucleotide"
gagatcgtgttgactcaaagtcctgcaaccctgtctgctagtccaggggagagggttactctcagttgttctgcaagcagtagcgtatcctacatgaactggtatcaacaaaagcctggtcaggcaccacggcggttgatatatgactcctccaagttggcctctggggtgcccgcaagattctccgggtccggctctggccgcgattacacactgactataagcagtctggaaccagaggattttgccgtttactactgccaacaatggagccgaaaccccccaacctttggaggtggcactaaggtagagataaagggcggctccgagggcaagagcagcggcagcggcagcgagagcaagagcaccggcggcagccaggtacagttggtccaaagtggcgcagaggtaaagaaaccaggttcttcagtcaaggtaagttgcaaggcatctggatatacatttacccgcagtactatgcattgggtcaaacaggctccaggacaggggcttgaatggatgggttacatcaacccatctagtgcctatacaaactataatcagaaatttcagggcagagtgactctgacagccgacaaatcaacctctacagcatatatggagttgtcctctctccgtagtgaagatactgccgtctactattgtgcaagcccccaagtccactatgattatcagggtttcccttactgggggcagggtactttggttaccgtttcatccg

SEQ ID NO: 172 - DNA, 1434 bp, Artificial Sequence
  source: /note="Description of Artificial Sequence: Synthetic polynucleotide"
gaaattgttcttacacaaagtcctgctacactgtcagccagccccggtgagcgagtcacattgtcatgctctgcttccagtagtgtgagctacatgaactggtaccaacagaaacctggtcaggctccaaggcgcttgatatacgacagcagcaaactggcaagtggtgtacctgctcggttttctggatcaggctcaggtagagactatactctcaccatttcctctctggaacctgaggactttgctgtttattattgccagcagtggagtcgcaaccctcccaccttcggtggagggacaaaagtagaaataaagggcggctccgagggcaagagcagcggcagcggcagcgagagcaagagcaccggcggcagccaagttcaactggtccaaagcggtgctgaagttaaaaagccaggaagcagtgttaaagtctcatgtaaggccagcggttacacttttactaggagtaccatgcactgggtgaagcaggcccccggtcagggtcttgagtggatgggatatataaacccatcatccgcctacactaattacaaccaaaagtttcagggtcgcgtgactttgaccgccgacaaatctaccagcacagcctacatggaactcagttctctccgatccgaagataccgctgtatattactgtgcttccccacaagtacactatgattacgggggcttcccatactggggccagggaactctcgtcacagtatcatccgagcccaaatctagcgacaaaactcacacatgtccaccgtgcccagcacctgaagcagcagggggaccgtcagtcttcctcttccccccaaaacccaaggacaccctcatgatctcccggacccctgaggtcacatgcgtggtggtgagcgtgagccacgaagaccctgaggtcaagttcaactggtacgtggacggcgtggaggtgcataatgccaagacaaagccgcgggaggagcagtacaacagcacgtaccgtgtggtcagcgtcctcaccgtcctgcaccaggactggctgaatggcaaggagtacaagtgcaaggtctccaacaaagccctcccagcccccatcgagaaaaccatctccaaagccaaagggcagccccgagaaccacaggtgtacgtgtaccccccatcccgggaggagatgaccaagaaccaggtcagcctgacctgcctggtcaaaggcttctatcccagcgacatcgccgtggagtgggagagcaatgggcagccggagaacaactacaagaccacgcctcccgtgctggactccgacggctccttcgccctcgtgagcaagctcaccgtggacaagtctagatggcagcaggggaacgtcttctcatgctccgtgatgcatgaggctctgcacaaccactacacgcagaagagcctctccctgtctccgggt

SEQ ID NO: 173 - DNA, 742 bp, Artificial Sequence
  source: /note="Description of Artificial Sequence: Synthetic polynucleotide"
gaaattgttcttacacaaagtcctgctacactgtcagccagccccggtgagcgagtcacattgtcatgctctgcttccagtagtgtgagctacatgaactggtaccaacagaaacctggtcaggctccaaggcgcttgatatacgacagcagcaaactggcaagtggtgtacctgctcggttttctggatcaggctcaggtagagactatactctcaccatttcctctctggaacctgaggactttgctgtttattattgccagcagtggagtcgcaaccctcccaccttcggtggagggacaaaagtagaaataaagggcggctccgagggcaagagcagcggcagcggcagcgagagcaagagcaccggcggcagccaagttcaactggtccaaagcggtgctgaagttaaaaagccaggaagcagtgttaaagtctcatgtaaggccagcggttacacttttactaggagtaccatgcactgggtgaagcaggcccccggtcagggtcttgagtggatgggatatataaacccatcatccgcctacactaattacaaccaaaagtttcagggtcgcgtgactttgaccgccgacaaatctaccagcacagcctacatggaactcagttctctccgatccgaagataccgctgtatattactgtgcttccccacaagtacactatgattacgggggcttcccatactggggccagggaactctcgtcacagtatcatccg

SEQ ID NO: 174 - DNA, 1434 bp, Artificial Sequence
  source: /note="Description of Artificial Sequence: Synthetic polynucleotide"
gaaattgtattgactcagtccccagctacattgagcgcaagtcctggcgagagagtaaccctgtcttgttctgccagtagtagtgtaagctacatgaactggtatcagcagaaacccggacaggccccacgccgacttatctatgattcaagtaagctcgctagtggggttccagccagatttagtggttctggctctggacgcgattacactctgaccatttcttctctggagcctgaggacttcgcagtatattactgccaacaatggtcacgcaatccaccaacattcggtggagggacaaaagtggaaatcaaaggcggctccgagggcaagagcagcggcagcggcagcgagagcaagagcaccggcggcagccaagttcagttggttcaatccggcgctgaggtcaaaaaacctggatcatctgtgaaagtctcatgtaaggcatctggttataccttcactcggagtaccatgcattgggttaagcaggcccccggtcaggggttggagtggatgggttacatcaacccttcctcagcctacacaaattataatcagaaatttcaggggcgcgttactctcaccgctgacaagtccacctccacagcctatatggagctgtcaagcctgcggagtgaggatacagccgtatattactgtgccagtcctcaggttcattatgattacgctggcttcccatattggggtcaggggactctcgtcactgtgtccagcgagcccaaatctagcgacaaaactcacacatgtccaccgtgcccagcacctgaagcagcagggggaccgtcagtcttcctcttccccccaaaacccaaggacaccctcatgatctcccggacccctgaggtcacatgcgtggtggtgagcgtgagccacgaagaccctgaggtcaagttcaactggtacgtggacggcgtggaggtgcataatgccaagacaaagccgcgggaggagcagtacaacagcacgtaccgtgtggtcagcgtcctcaccgtcctgcaccaggactggctgaatggcaaggagtacaagtgcaaggtctccaacaaagccctcccagcccccatcgagaaaaccatctccaaagccaaagggcagccccgagaaccacaggtgtacgtgtaccccccatcccgggaggagatgaccaagaaccaggtcagcctgacctgcctggtcaaaggcttctatcccagcgacatcgccgtggagtgggagagcaatgggcagccggagaacaactacaagaccacgcctcccgtgctggactccgacggctccttcgccctcgtgagcaagctcaccgtggacaagtctagatggcagcaggggaacgtcttctcatgctccgtgatgcatgaggctctgcacaaccactacacgcagaagagcctctccctgtctccgggt

SEQ ID NO: 175 - DNA, 742 bp, Artificial Sequence
  source: /note="Description of Artificial Sequence: Synthetic polynucleotide"
gaaattgtattgactcagtccccagctacattgagcgcaagtcctggcgagagagtaaccctgtcttgttctgccagtagtagtgtaagctacatgaactggtatcagcagaaacccggacaggccccacgccgacttatctatgattcaagtaagctcgctagtggggttccagccagatttagtggttctggctctggacgcgattacactctgaccatttcttctctggagcctgaggacttcgcagtatattactgccaacaatggtcacgcaatccaccaacattcggtggagggacaaaagtggaaatcaaaggcggctccgagggcaagagcagcggcagcggcagcgagagcaagagcaccggcggcagccaagttcagttggttcaatccggcgctgaggtcaaaaaacctggatcatctgtgaaagtctcatgtaaggcatctggttataccttcactcggagtaccatgcattgggttaagcaggcccccggtcaggggttggagtggatgggttacatcaacccttcctcagcctacacaaattataatcagaaatttcaggggcgcgttactctcaccgctgacaagtccacctccacagcctatatggagctgtcaagcctgcggagtgaggatacagccgtatattactgtgccagtcctcaggttcattatgattacgctggcttcccatattggggtcaggggactctcgtcactgtgtccagcg

SEQ ID NO: 176 - DNA, 1434 bp, Artificial Sequence
  source: /note="Description of Artificial Sequence: Synthetic polynucleotide"
gagatagttcttacacagagccctgcaaccttgagtgcaagtccaggggaacgggtgactctgagttgtagtgcttctagttccgtaagttatatgaactggtaccaacagaagccaggtcaagcaccaagacgccttatctacgactcatctaaacttgctagtggagtgccagccagattttccggttcaggaagtgggagggactacacacttaccatctcatcccttgagcccgaagatttcgccgtatattactgtcaacaatggtcaagaaatcctcctacatttggtggtggtacaaaagtagagatcaagggcggctccgagggcaagagcagcggcagcggcagcgagagcaagagcaccggcggcagccaagtgcagttggtgcagagtggggctgaggttaaaaagcctggttccagtgtgaaagtcagttgtaaagcctccgggtacacttttactaggtcaacaatgcactgggtcaagcaagcccccggccaaggcttggaatggatggggtacataaatccaagcagtgcctacaccaactataaccaaaaatttcaaggtagagtaacattgactgctgacaagtccacatcaactgcttatatggagctgtcctctcttcggtctgaagataccgccgtatactattgcgcctccccccaagtccactacgactataacggatttccctactggggacaaggaaccctggtaacagtttcttcagagcccaaatctagcgacaaaactcacacatgtccaccgtgcccagcacctgaagcagcagggggaccgtcagtcttcctcttccccccaaaacccaaggacaccctcatgatctcccggacccctgaggtcacatgcgtggtggtgagcgtgagccacgaagaccctgaggtcaagttcaactggtacgtggacggcgtggaggtgcataatgccaagacaaagccgcgggaggagcagtacaacagcacgtaccgtgtggtcagcgtcctcaccgtcctgcaccaggactggctgaatggcaaggagtacaagtgcaaggtctccaacaaagccctcccagcccccatcgagaaaaccatctccaaagccaaagggcagccccgagaaccacaggtgtacgtgtaccccccatcccgggaggagatgaccaagaaccaggtcagcctgacctgcctggtcaaaggcttctatcccagcgacatcgccgtggagtgggagagcaatgggcagccggagaacaactacaagaccacgcctcccgtgctggactccgacggctccttcgccctcgtgagcaagctcaccgtggacaagtctagatggcagcaggggaacgtcttctcatgctccgtgatgcatgaggctctgcacaaccactacacgcagaagagcctctccctgtctccgggt

SEQ ID NO: 177 - DNA, 742 bp, Artificial Sequence
  source: /note="Description of Artificial Sequence: Synthetic polynucleotide"
gagatagttcttacacagagccctgcaaccttgagtgcaagtccaggggaacgggtgactctgagttgtagtgcttctagttccgtaagttatatgaactggtaccaacagaagccaggtcaagcaccaagacgccttatctacgactcatctaaacttgctagtggagtgccagccagattttccggttcaggaagtgggagggactacacacttaccatctcatcccttgagcccgaagatttcgccgtatattactgtcaacaatggtcaagaaatcctcctacatttggtggtggtacaaaagtagagatcaagggcggctccgagggcaagagcagcggcagcggcagcgagagcaagagcaccggcggcagccaagtgcagttggtgcagagtggggctgaggttaaaaagcctggttccagtgtgaaagtcagttgtaaagcctccgggtacacttttactaggtcaacaatgcactgggtcaagcaagcccccggccaaggcttggaatggatggggtacataaatccaagcagtgcctacaccaactataaccaaaaatttcaaggtagagtaacattgactgctgacaagtccacatcaactgcttatatggagctgtcctctcttcggtctgaagataccgccgtatactattgcgcctccccccaagtccactacgactataacggatttccctactggggacaaggaaccctggtaacagtttcttcag

SEQ ID NO: 178 - DNA, 1434 bp, Artificial Sequence
  source: /note="Description of Artificial Sequence: Synthetic polynucleotide"
gaaattgtcctgactcagtctccagccacactgagtgcatctcccggcgagcgggtcactcttagttgcagcgccagttctagtgtatcatatatgaactggtatcagcaaaagccaggtcaagctcccaggcgatggatatacgactcatcaaaactcgcctctggcgtcccagcccggttctccggttccggctctgggcgcgactatacccttacaatttctagcctcgaaccagaagattttgctgtatattattgtcaacagtggtcacgtaacccaccaaccttcggtggagggacaaaggtcgagataaaaggcggctccgagggcaagagcagcggcagcggcagcgagagcaagagcaccggcggcagccaagtacagctcgttcagtccggtgcagaagtcaagaaaccaggaagtagcgtaaaagtgtcatgtaaagcaagtggttatacctttacacgctcaactatgcattgggttaagcaggctccaggacaagggcttgagtggataggatacatcaatccatctagcgcctacacaaattataaccagaagttccaggggagagttaccctcactgccgataagtccacatcaaccgcctatatggaattgagttcccttcgtagtgaggacactgccgtctactactgtgcctcccctcaggttcattatgattactcaggttttccatactggggccagggcaccctcgtaacagtaagcagcgagcccaaatctagcgacaaaactcacacatgtccaccgtgcccagcacctgaagcagcagggggaccgtcagtcttcctcttccccccaaaacccaaggacaccctcatgatctcccggacccctgaggtcacatgcgtggtggtgagcgtgagccacgaagaccctgaggtcaagttcaactggtacgtggacggcgtggaggtgcataatgccaagacaaagccgcgggaggagcagtacaacagcacgtaccgtgtggtcagcgtcctcaccgtcctgcaccaggactggctgaatggcaaggagtacaagtgcaaggtctccaacaaagccctcccagcccccatcgagaaaaccatctccaaagccaaagggcagccccgagaaccacaggtgtacgtgtaccccccatcccgggaggagatgaccaagaaccaggtcagcctgacctgcctggtcaaaggcttctatcccagcgacatcgccgtggagtgggagagcaatgggcagccggagaacaactacaagaccacgcctcccgtgctggactccgacggctccttcgccctcgtgagcaagctcaccgtggacaagtctagatggcagcaggggaacgtcttctcatgctccgtgatgcatgaggctctgcacaaccactacacgcagaagagcctctccctgtctccgggt

SEQ ID NO: 179 - DNA, 742 bp, Artificial Sequence
  source: /note="Description of Artificial Sequence: Synthetic polynucleotide"
gaaattgtcctgactcagtctccagccacactgagtgcatctcccggcgagcgggtcactcttagttgcagcgccagttctagtgtatcatatatgaactggtatcagcaaaagccaggtcaagctcccaggcgatggatatacgactcatcaaaactcgcctctggcgtcccagcccggttctccggttccggctctgggcgcgactatacccttacaatttctagcctcgaaccagaagattttgctgtatattattgtcaacagtggtcacgtaacccaccaaccttcggtggagggacaaaggtcgagataaaaggcggctccgagggcaagagcagcggcagcggcagcgagagcaagagcaccggcggcagccaagtacagctcgttcagtccggtgcagaagtcaagaaaccaggaagtagcgtaaaagtgtcatgtaaagcaagtggttatacctttacacgctcaactatgcattgggttaagcaggctccaggacaagggcttgagtggataggatacatcaatccatctagcgcctacacaaattataaccagaagttccaggggagagttaccctcactgccgataagtccacatcaaccgcctatatggaattgagttcccttcgtagtgaggacactgccgtctactactgtgcctcccctcaggttcattatgattactcaggttttccatactggggccagggcaccctcgtaacagtaagcagcg

SEQ ID NO: 180 - DNA, 1434 bp, Artificial Sequence
  source: /note="Description of Artificial Sequence: Synthetic polynucleotide"
gaaattgtactcacacaaagtcctgcaactttgtctgcctcaccaggggaaagagtaactcttagttgtagtgctagttcatccgtttcttatatgaattggtatcagcagaaacccggacaagcaccccggcggtggatatacgattccagtaaacttgcaagcggagtccccgcacgtttcagcggcagtggctcaggccgggactataccctgactatttcctccttggaacctgaggattttgctgtgtactactgtcagcaatggagtagaaatcctcccacctttggaggtggcactaaagtagagatcaaaggcggctccgagggcaagagcagcggcagcggcagcgagagcaagagcaccggcggcagccaggtgcaactggtacaaagtggtgccgaggtgaagaagccagggtccagtgtgaaagtatcatgtaaagccagcgggtacacattcactaggagcactatgcactgggtaaagcaagccccagggcaaggtttggagtggatcggttatattaacccttcatctgcttatacaaattacaatcagaaattccaagggagggtcactttgaccgctgacaagtctacctctactgcatacatggaactctccagccttcgttcagaagacacagccgtttattactgtgcctccccacaggtacactacgactacggtggattcccatattggggtcaaggcacccttgtaacagtatcaagcgagcccaaatctagcgacaaaactcacacatgtccaccgtgcccagcacctgaagcagcagggggaccgtcagtcttcctcttccccccaaaacccaaggacaccctcatgatctcccggacccctgaggtcacatgcgtggtggtgagcgtgagccacgaagaccctgaggtcaagttcaactggtacgtggacggcgtggaggtgcataatgccaagacaaagccgcgggaggagcagtacaacagcacgtaccgtgtggtcagcgtcctcaccgtcctgcaccaggactggctgaatggcaaggagtacaagtgcaaggtctccaacaaagccctcccagcccccatcgagaaaaccatctccaaagccaaagggcagccccgagaaccacaggtgtacgtgtaccccccatcccgggaggagatgaccaagaaccaggtcagcctgacctgcctggtcaaaggcttctatcccagcgacatcgccgtggagtgggagagcaatgggcagccggagaacaactacaagaccacgcctcccgtgctggactccgacggctccttcgccctcgtgagcaagctcaccgtggacaagtctagatggcagcaggggaacgtcttctcatgctccgtgatgcatgaggctctgcacaaccactacacgcagaagagcctctccctgtctccgggt

SEQ ID NO: 181 - DNA, 742 bp, Artificial Sequence
  source: /note="Description of Artificial Sequence: Synthetic polynucleotide"
gaaattgtactcacacaaagtcctgcaactttgtctgcctcaccaggggaaagagtaactcttagttgtagtgctagttcatccgtttcttatatgaattggtatcagcagaaacccggacaagcaccccggcggtggatatacgattccagtaaacttgcaagcggagtccccgcacgtttcagcggcagtggctcaggccgggactataccctgactatttcctccttggaacctgaggattttgctgtgtactactgtcagcaatggagtagaaatcctcccacctttggaggtggcactaaagtagagatcaaaggcggctccgagggcaagagcagcggcagcggcagcgagagcaagagcaccggcggcagccaggtgcaactggtacaaagtggtgccgaggtgaagaagccagggtccagtgtgaaagtatcatgtaaagccagcgggtacacattcactaggagcactatgcactgggtaaagcaagccccagggcaaggtttggagtggatcggttatattaacccttcatctgcttatacaaattacaatcagaaattccaagggagggtcactttgaccgctgacaagtctacctctactgcatacatggaactctccagccttcgttcagaagacacagccgtttattactgtgcctccccacaggtacactacgactacggtggattcccatattggggtcaaggcacccttgtaacagtatcaagcg

SEQ ID NO: 182 - DNA, 1434 bp, Artificial Sequence
  source: /note="Description of Artificial Sequence: Synthetic polynucleotide"
gaaattgttttgacccaatcacctgccactctctctgcctctcctggtgagcgagttactttgtcatgtagcgcatcatcaagtgtatcttacatgaactggtaccaacaaaaacccggacaggcaccacgtcgttggatttatgacagtagcaagctcgcctccggggtacccgcaagattttccgggtcagggtctggcagggactataccctgacaatcagcagtctggaacctgaggactttgctgtgtattactgccaacagtggtctcgcaacccccctactttcgggggaggtacaaaggtagaaattaagggcggctccgagggcaagagcagcggcagcggcagcgagagcaagagcaccggcggcagccaagtgcaactcgtgcaaagcggggctgaagtgaagaagcctggatcaagcgtgaaggtcagttgcaaagcctctggatataccttcactcgatcaaccatgcactgggtcaagcaggccccagggcaagggctcgaatggataggatatattaacccaagttctgcctacactaactataatcagaagtttcaaggccgggtaacacttacagccgataagagtacctcaacagcatacatggaacttagttctttgcggagcgaggataccgctgtgtattactgcgcttcacctcaggttcactacgactacgctggatttccctattggggtcagggtacactggttacagtttcctctgagcccaaatctagcgacaaaactcacacatgtccaccgtgcccagcacctgaagcagcagggggaccgtcagtcttcctcttccccccaaaacccaaggacaccctcatgatctcccggacccctgaggtcacatgcgtggtggtgagcgtgagccacgaagaccctgaggtcaagttcaactggtacgtggacggcgtggaggtgcataatgccaagacaaagccgcgggaggagcagtacaacagcacgtaccgtgtggtcagcgtcctcaccgtcctgcaccaggactggctgaatggcaaggagtacaagtgcaaggtctccaacaaagccctcccagcccccatcgagaaaaccatctccaaagccaaagggcagccccgagaaccacaggtgtacgtgtaccccccatcccgggaggagatgaccaagaaccaggtcagcctgacctgcctggtcaaaggcttctatcccagcgacatcgccgtggagtgggagagcaatgggcagccggagaacaactacaagaccacgcctcccgtgctggactccgacggctccttcgccctcgtgagcaagctcaccgtggacaagtctagatggcagcaggggaacgtcttctcatgctccgtgatgcatgaggctctgcacaaccactacacgcagaagagcctctccctgtctccgggt

SEQ ID NO: 183 - DNA, 742 bp, Artificial Sequence
  source: /note="Description of Artificial Sequence: Synthetic polynucleotide"
gaaattgttttgacccaatcacctgccactctctctgcctctcctggtgagcgagttactttgtcatgtagcgcatcatcaagtgtatcttacatgaactggtaccaacaaaaacccggacaggcaccacgtcgttggatttatgacagtagcaagctcgcctccggggtacccgcaagattttccgggtcagggtctggcagggactataccctgacaatcagcagtctggaacctgaggactttgctgtgtattactgccaacagtggtctcgcaacccccctactttcgggggaggtacaaaggtagaaattaagggcggctccgagggcaagagcagcggcagcggcagcgagagcaagagcaccggcggcagccaagtgcaactcgtgcaaagcggggctgaagtgaagaagcctggatcaagcgtgaaggtcagttgcaaagcctctggatataccttcactcgatcaaccatgcactgggtcaagcaggccccagggcaagggctcgaatggataggatatattaacccaagttctgcctacactaactataatcagaagtttcaaggccgggtaacacttacagccgataagagtacctcaacagcatacatggaacttagttctttgcggagcgaggataccgctgtgtattactgcgcttcacctcaggttcactacgactacgctggatttccctattggggtcagggtacactggttacagtttcctctg

SEQ ID NO: 184 - DNA, 1434 bp, Artificial Sequence
  source: /note="Description of Artificial Sequence: Synthetic polynucleotide"
gaaattgtcttgacccagtctccagcaactcttagtgcatcaccaggtgagcgtgttaccctctcatgtagcgccagctcatctgttagttatatgaattggtatcaacagaaaccagggcaagctcccagaagatggatatatgattcttcaaaactcgcaagtggtgtcccagcccgcttctcaggctctggttccggtcgcgattatactctcaccatcagtagtttggaacccgaagatttcgccgtctattattgccagcaatggagcaggaatccccccacattcggcggcggtacaaaggttgagattaagggcggctccgagggcaagagcagcggcagcggcagcgagagcaagagcaccggcggcagccaagttcagttggttcaatccggcgcagaggttaaaaaacccggatcaagcgttaaggttagttgtaaagcctctggctacactttcacacgctcaacaatgcattgggttaagcaggcccctgggcagggactggagtggatcggttacataaacccatccagcgcctatacaaactataaccagaagttccaagggcgggttacattgaccgctgacaagtccactagcacagcatatatggagctgtcaagtctgagatccgaagacactgccgtatattattgcgctagtccacaagtgcactatgactataacggttttccctattggggacaaggaaccctggtgaccgttagctccgagcccaaatctagcgacaaaactcacacatgtccaccgtgcccagcacctgaagcagcagggggaccgtcagtcttcctcttccccccaaaacccaaggacaccctcatgatctcccggacccctgaggtcacatgcgtggtggtgagcgtgagccacgaagaccctgaggtcaagttcaactggtacgtggacggcgtggaggtgcataatgccaagacaaagccgcgggaggagcagtacaacagcacgtaccgtgtggtcagcgtcctcaccgtcctgcaccaggactggctgaatggcaaggagtacaagtgcaaggtctccaacaaagccctcccagcccccatcgagaaaaccatctccaaagccaaagggcagccccgagaaccacaggtgtacgtgtaccccccatcccgggaggagatgaccaagaaccaggtcagcctgacctgcctggtcaaaggcttctatcccagcgacatcgccgtggagtgggagagcaatgggcagccggagaacaactacaagaccacgcctcccgtgctggactccgacggctccttcgccctcgtgagcaagctcaccgtggacaagtctagatggcagcaggggaacgtcttctcatgctccgtgatgcatgaggctctgcacaaccactacacgcagaagagcctctccctgtctccgggt

SEQ ID NO: 185 - DNA, 742 bp, Artificial Sequence
  source: /note="Description of Artificial Sequence: Synthetic polynucleotide"
gaaattgtcttgacccagtctccagcaactcttagtgcatcaccaggtgagcgtgttaccctctcatgtagcgccagctcatctgttagttatatgaattggtatcaacagaaaccagggcaagctcccagaagatggatatatgattcttcaaaactcgcaagtggtgtcccagcccgcttctcaggctctggttccggtcgcgattatactctcaccatcagtagtttggaacccgaagatttcgccgtctattattgccagcaatggagcaggaatccccccacattcggcggcggtacaaaggttgagattaagggcggctccgagggcaagagcagcggcagcggcagcgagagcaagagcaccggcggcagccaagttcagttggttcaatccggcgcagaggttaaaaaacccggatcaagcgttaaggttagttgtaaagcctctggctacactttcacacgctcaacaatgcattgggttaagcaggcccctgggcagggactggagtggatcggttacataaacccatccagcgcctatacaaactataaccagaagttccaagggcgggttacattgaccgctgacaagtccactagcacagcatatatggagctgtcaagtctgagatccgaagacactgccgtatattattgcgctagtccacaagtgcactatgactataacggttttccctattggggacaaggaaccctggtgaccgttagctccg

SEQ ID NO: 186 - DNA, 1434 bp, Artificial Sequence
  source: /note="Description of Artificial Sequence: Synthetic polynucleotide"
caagtgcagttggtccagtcaggcgcagaagtgaagaagcccggctcaagcgtcaaggtatcatgtaaggcttctggatatactttcacccgaagcacaatgcactgggttcgccaggcccctggacagggtcttgagtggatggggtatatcaacccatcctcagcatatactaactatgctcagaagtttcaggggcgtgtcactttgaccgccgataagtccacaagcaccgcttatatggaactgtcttcattgcgctctgaagacactgcagtgtactattgcgccagcccacaggtccactacgactattctggatttccatactgggggcaggggaccttggtgactgtaagctctggcggctccgagggcaagagcagcggcagcggcagcgagagcaagagcaccggcggcagcgagattgtactgacacagtccccagcaaccttgtccgcttctcccggcgaaagggtcactctctcctgctccgctagttcttcagtgtcatatatgaattggtaccaacaaaagccaggtcaggctccaagaagatggatttacgattcctccaagttggcttctggtgtccctgcacgatttagcgggtcagggtcagggcgcgattacacactcacaattagtagtctcgaacccgaggactttgccgtatattactgtcagcaatggagtcggaatcccccaactttcggcgggggaacaaaagtagaaataaaagagcccaaatctagcgacaaaactcacacatgtccaccgtgcccagcacctgaagcagcagggggaccgtcagtcttcctcttccccccaaaacccaaggacaccctcatgatctcccggacccctgaggtcacatgcgtggtggtgagcgtgagccacgaagaccctgaggtcaagttcaactggtacgtggacggcgtggaggtgcataatgccaagacaaagccgcgggaggagcagtacaacagcacgtaccgtgtggtcagcgtcctcaccgtcctgcaccaggactggctgaatggcaaggagtacaagtgcaaggtctccaacaaagccctcccagcccccatcgagaaaaccatctccaaagccaaagggcagccccgagaaccacaggtgtacgtgtaccccccatcccgggaggagatgaccaagaaccaggtcagcctgacctgcctggtcaaaggcttctatcccagcgacatcgccgtggagtgggagagcaatgggcagccggagaacaactacaagaccacgcctcccgtgctggactccgacggctccttcgccctcgtgagcaagctcaccgtggacaagtctagatggcagcaggggaacgtcttctcatgctccgtgatgcatgaggctctgcacaaccactacacgcagaagagcctctccctgtctccgggt

SEQ ID NO: 187 - DNA, 742 bp, Artificial Sequence
  source: /note="Description of Artificial Sequence: Synthetic polynucleotide"
caagtgcagttggtccagtcaggcgcagaagtgaagaagcccggctcaagcgtcaaggtatcatgtaaggcttctggatatactttcacccgaagcacaatgcactgggttcgccaggcccctggacagggtcttgagtggatggggtatatcaacccatcctcagcatatactaactatgctcagaagtttcaggggcgtgtcactttgaccgccgataagtccacaagcaccgcttatatggaactgtcttcattgcgctctgaagacactgcagtgtactattgcgccagcccacaggtccactacgactattctggatttccatactgggggcaggggaccttggtgactgtaagctctggcggctccgagggcaagagcagcggcagcggcagcgagagcaagagcaccggcggcagcgagattgtactgacacagtccccagcaaccttgtccgcttctcccggcgaaagggtcactctctcctgctccgctagttcttcagtgtcatatatgaattggtaccaacaaaagccaggtcaggctccaagaagatggatttacgattcctccaagttggcttctggtgtccctgcacgatttagcgggtcagggtcagggcgcgattacacactcacaattagtagtctcgaacccgaggactttgccgtatattactgtcagcaatggagtcggaatcccccaactttcggcgggggaacaaaagtagaaataaaag

SEQ ID NO: 188 - DNA, 1434 bp, Artificial Sequence
  source: /note="Description of Artificial Sequence: Synthetic polynucleotide"
caagtgcagttggttcaatccggcgctgaagtgaagaaacctgggtcatctgtcaaagtatcctgtaaagcctctgggtacacttttacacgtagcaccatgcactgggtccgtcaagcccctgggcaaggccttgagtggatgggttatataaacccatcctccgcatacacaaattacgctcaaaaatttcaagggcgagtcactctcactgccgataaatccacttcaactgcctatatggagcttagttcattgcgatcagaagatactgcagtctattattgtgcatcacctcaggtccattacgactaccaagggttcccctactggggacaggggactttggtaactgtgtcttctggcggctccgagggcaagagcagcggcagcggcagcgagagcaagagcaccggcggcagcgagatcgtactgacccaaagtcccgccactctctctgctagcccaggcgagagagttaccttgtcttgctctgctagttcaagtgtcagttatatgaactggtatcagcagaagccaggacaggcacctcgaagatggatatatgactcctccaaactcgcatcaggcgtaccagcacgcttttctgggagcggtagtggtagggattatacactcaccatctctagtttggaaccagaagatttcgctgtgtactattgccagcagtggagccgcaaccctcctaccttcggcggtgggacaaaggtagaaataaaagagcccaaatctagcgacaaaactcacacatgtccaccgtgcccagcacctgaagcagcagggggaccgtcagtcttcctcttccccccaaaacccaaggacaccctcatgatctcccggacccctgaggtcacatgcgtggtggtgagcgtgagccacgaagaccctgaggtcaagttcaactggtacgtggacggcgtggaggtgcataatgccaagacaaagccgcgggaggagcagtacaacagcacgtaccgtgtggtcagcgtcctcaccgtcctgcaccaggactggctgaatggcaaggagtacaagtgcaaggtctccaacaaagccctcccagcccccatcgagaaaaccatctccaaagccaaagggcagccccgagaaccacaggtgtacgtgtaccccccatcccgggaggagatgaccaagaaccaggtcagcctgacctgcctggtcaaaggcttctatcccagcgacatcgccgtggagtgggagagcaatgggcagccggagaacaactacaagaccacgcctcccgtgctggactccgacggctccttcgccctcgtgagcaagctcaccgtggacaagtctagatggcagcaggggaacgtcttctcatgctccgtgatgcatgaggctctgcacaaccactacacgcagaagagcctctccctgtctccgggt

SEQ ID NO: 189 - DNA, 742 bp, Artificial Sequence
  source: /note="Description of Artificial Sequence: Synthetic polynucleotide"
caagtgcagttggttcaatccggcgctgaagtgaagaaacctgggtcatctgtcaaagtatcctgtaaagcctctgggtacacttttacacgtagcaccatgcactgggtccgtcaagcccctgggcaaggccttgagtggatgggttatataaacccatcctccgcatacacaaattacgctcaaaaatttcaagggcgagtcactctcactgccgataaatccacttcaactgcctatatggagcttagttcattgcgatcagaagatactgcagtctattattgtgcatcacctcaggtccattacgactaccaagggttcccctactggggacaggggactttggtaactgtgtcttctggcggctccgagggcaagagcagcggcagcggcagcgagagcaagagcaccggcggcagcgagatcgtactgacccaaagtcccgccactctctctgctagcccaggcgagagagttaccttgtcttgctctgctagttcaagtgtcagttatatgaactggtatcagcagaagccaggacaggcacctcgaagatggatatatgactcctccaaactcgcatcaggcgtaccagcacgcttttctgggagcggtagtggtagggattatacactcaccatctctagtttggaaccagaagatttcgctgtgtactattgccagcagtggagccgcaaccctcctaccttcggcggtgggacaaaggtagaaataaaag

SEQ ID NO: 190 - DNA, 1434 bp, Artificial Sequence
  source: /note="Description of Artificial Sequence: Synthetic polynucleotide"
caagttcagcttgtgcagagcggggcagaggtgaagaaacccggatcaagcgtcaaagtttcttgtaaagctagtggatatactttcacacgctcaactatgcactgggtgagacaagctcctggtcagggcctggagtggatggggtacataaatccctccagtgcatatactaactatgctcaaaagttccaaggccgcgtaactctcactgccgataagtccaccagcactgcctacatggaactgtctagtttgcgatccgaggacaccgccgtgtactactgtgcttcacctcaagtacattatgactacgggggatttccctactggggccaaggtactttggtcacagtctcaagcggcggctccgagggcaagagcagcggcagcggcagcgagagcaagagcaccggcggcagcgagatcgtattgacacaatcacccgccacattgtcagctagccccggtgagcgcgtcacactttcttgtagtgcatcaagtagcgtttcttacatgaattggtatcagcagaaaccaggacaagcaccacggcgatggatatacgattctagcaaactcgccagtggcgtccccgctcgattctccgggtctggcagtggtagagattatacactcactatcagttctctggaaccagaagacttcgcagtctattactgtcaacaatggtcacggaatccccccacattcggtggtggcaccaaggttgaaattaaggagcccaaatctagcgacaaaactcacacatgtccaccgtgcccagcacctgaagcagcagggggaccgtcagtcttcctcttccccccaaaacccaaggacaccctcatgatctcccggacccctgaggtcacatgcgtggtggtgagcgtgagccacgaagaccctgaggtcaagttcaactggtacgtggacggcgtggaggtgcataatgccaagacaaagccgcgggaggagcagtacaacagcacgtaccgtgtggtcagcgtcctcaccgtcctgcaccaggactggctgaatggcaaggagtacaagtgcaaggtctccaacaaagccctcccagcccccatcgagaaaaccatctccaaagccaaagggcagccccgagaaccacaggtgtacgtgtaccccccatcccgggaggagatgaccaagaaccaggtcagcctgacctgcctggtcaaaggcttctatcccagcgacatcgccgtggagtgggagagcaatgggcagccggagaacaactacaagaccacgcctcccgtgctggactccgacggctccttcgccctcgtgagcaagctcaccgtggacaagtctagatggcagcaggggaacgtcttctcatgctccgtgatgcatgaggctctgcacaaccactacacgcagaagagcctctccctgtctccgggt

SEQ ID NO: 191 - DNA, 742 bp, Artificial Sequence
  source: /note="Description of Artificial Sequence: Synthetic polynucleotide"
caagttcagcttgtgcagagcggggcagaggtgaagaaacccggatcaagcgtcaaagtttcttgtaaagctagtggatatactttcacacgctcaactatgcactgggtgagacaagctcctggtcagggcctggagtggatggggtacataaatccctccagtgcatatactaactatgctcaaaagttccaaggccgcgtaactctcactgccgataagtccaccagcactgcctacatggaactgtctagtttgcgatccgaggacaccgccgtgtactactgtgcttcacctcaagtacattatgactacgggggatttccctactggggccaaggtactttggtcacagtctcaagcggcggctccgagggcaagagcagcggcagcggcagcgagagcaagagcaccggcggcagcgagatcgtattgacacaatcacccgccacattgtcagctagccccggtgagcgcgtcacactttcttgtagtgcatcaagtagcgtttcttacatgaattggtatcagcagaaaccaggacaagcaccacggcgatggatatacgattctagcaaactcgccagtggcgtccccgctcgattctccgggtctggcagtggtagagattatacactcactatcagttctctggaaccagaagacttcgcagtctattactgtcaacaatggtcacggaatccccccacattcggtggtggcaccaaggttgaaattaagg

SEQ ID NO: 192 - DNA, 1434 bp, Artificial Sequence
  source: /note="Description of Artificial Sequence: Synthetic polynucleotide"
caagtgcaattggtccaaagtggagctgaagtaaaaaaacccggctcctctgtgaaggtcagttgcaaagcctcagggtacacctttactaggtcaacaatgcactgggtgcgacaagctcccggtcagggtttggagtggatgggatacataaacccctcatcagcctacacaaattatgcacaaaaatttcagggtcgggttacactcaccgccgacaaatccacttccactgcttatatggaactttcctctctccgcagtgaggacacagcagtgtactattgtgcctcccctcaagtgcattatgactacgctggtttcccttactggggacaaggtactctggttacagtttcttccggcggctccgagggcaagagcagcggcagcggcagcgagagcaagagcaccggcggcagcgaaatagtgctgacccagagccccgctaccctttctgcaagtcctggggaacgtgttacattgtcttgtagcgcttcttcatcagtctcctatatgaattggtatcaacaaaaaccaggacaagctcctcggcggtggatctacgacagttccaaacttgcctctggtgtgcctgctcggtttagtgggtctggaagtggacgagattatactctgaccatcagttccttggaacccgaggattttgctgtttattactgccaacaatggagtagaaaccctccaacctttggaggtggaactaaggtcgagataaaggagcccaaatctagcgacaaaactcacacatgtccaccgtgcccagcacctgaagcagcagggggaccgtcagtcttcctcttccccccaaaacccaaggacaccctcatgatctcccggacccctgaggtcacatgcgtggtggtgagcgtgagccacgaagaccctgaggtcaagttcaactggtacgtggacggcgtggaggtgcataatgccaagacaaagccgcgggaggagcagtacaacagcacgtaccgtgtggtcagcgtcctcaccgtcctgcaccaggactggctgaatggcaaggagtacaagtgcaaggtctccaacaaagccctcccagcccccatcgagaaaaccatctccaaagccaaagggcagccccgagaaccacaggtgtacgtgtaccccccatcccgggaggagatgaccaagaaccaggtcagcctgacctgcctggtcaaaggcttctatcccagcgacatcgccgtggagtgggagagcaatgggcagccggagaacaactacaagaccacgcctcccgtgctggactccgacggctccttcgccctcgtgagcaagctcaccgtggacaagtctagatggcagcaggggaacgtcttctcatgctccgtgatgcatgaggctctgcacaaccactacacgcagaagagcctctccctgtctccgggt

SEQ ID NO: 193 - DNA, 742 bp, Artificial Sequence
  source: /note="Description of Artificial Sequence: Synthetic polynucleotide"
caagtgcaattggtccaaagtggagctgaagtaaaaaaacccggctcctctgtgaaggtcagttgcaaagcctcagggtacacctttactaggtcaacaatgcactgggtgcgacaagctcccggtcagggtttggagtggatgggatacataaacccctcatcagcctacacaaattatgcacaaaaatttcagggtcgggttacactcaccgccgacaaatccacttccactgcttatatggaactttcctctctccgcagtgaggacacagcagtgtactattgtgcctcccctcaagtgcattatgactacgctggtttcccttactggggacaaggtactctggttacagtttcttccggcggctccgagggcaagagcagcggcagcggcagcgagagcaagagcaccggcggcagcgaaatagtgctgacccagagccccgctaccctttctgcaagtcctggggaacgtgttacattgtcttgtagcgcttcttcatcagtctcctatatgaattggtatcaacaaaaaccaggacaagctcctcggcggtggatctacgacagttccaaacttgcctctggtgtgcctgctcggtttagtgggtctggaagtggacgagattatactctgaccatcagttccttggaacccgaggattttgctgtttattactgccaacaatggagtagaaaccctccaacctttggaggtggaactaaggtcgagataaagg

SEQ ID NO: 194 - DNA, 1434 bp, Artificial Sequence
  source: /note="Description of Artificial Sequence: Synthetic polynucleotide"
caggtacaactcgtgcaaagtggtgctgaagtgaagaaacctggatcaagcgtcaaggtatcctgtaaagcatcaggatacaccttcacacgcagtactatgcattgggtgcgtcaagcccccggacagggcctggaatggatgggctacataaacccttcttccgcctacaccaattatgcccaaaagttccagggaagggtgactctgactgctgataaaagtactagcaccgcatacatggaactgtcttcactgagaagcgaggacaccgccgtctattattgtgcatccccccaagtccactatgattacaacggatttccttactggggccagggaaccttggtcaccgtgtcttccggcggctccgagggcaagagcagcggcagcggcagcgagagcaagagcaccggcggcagcgaaatcgttctcacacagagccctgcaacattgtcagcttcacccggtgaacgagtaacattgtcctgttctgcctcaagtagtgtgagctatatgaattggtatcaacaaaaaccagggcaggcccctagaaggtggatctatgattcaagcaaactggcatccggcgtccctgcccgctttagtggaagcggttcaggaagggactatactcttactatctccagccttgaacctgaagattttgcagtctactactgccaacaatggtctaggaatccccccacttttggtggagggaccaaagttgagatcaaagagcccaaatctagcgacaaaactcacacatgtccaccgtgcccagcacctgaagcagcagggggaccgtcagtcttcctcttccccccaaaacccaaggacaccctcatgatctcccggacccctgaggtcacatgcgtggtggtgagcgtgagccacgaagaccctgaggtcaagttcaactggtacgtggacggcgtggaggtgcataatgccaagacaaagccgcgggaggagcagtacaacagcacgtaccgtgtggtcagcgtcctcaccgtcctgcaccaggactggctgaatggcaaggagtacaagtgcaaggtctccaacaaagccctcccagcccccatcgagaaaaccatctccaaagccaaagggcagccccgagaaccacaggtgtacgtgtaccccccatcccgggaggagatgaccaagaaccaggtcagcctgacctgcctggtcaaaggcttctatcccagcgacatcgccgtggagtgggagagcaatgggcagccggagaacaactacaagaccacgcctcccgtgctggactccgacggctccttcgccctcgtgagcaagctcaccgtggacaagtctagatggcagcaggggaacgtcttctcatgctccgtgatgcatgaggctctgcacaaccactacacgcagaagagcctctccctgtctccgggt

SEQ ID NO: 195 - DNA, 742 bp, Artificial Sequence
  source: /note="Description of Artificial Sequence: Synthetic polynucleotide"
caggtacaactcgtgcaaagtggtgctgaagtgaagaaacctggatcaagcgtcaaggtatcctgtaaagcatcaggatacaccttcacacgcagtactatgcattgggtgcgtcaagcccccggacagggcctggaatggatgggctacataaacccttcttccgcctacaccaattatgcccaaaagttccagggaagggtgactctgactgctgataaaagtactagcaccgcatacatggaactgtcttcactgagaagcgaggacaccgccgtctattattgtgcatccccccaagtccactatgattacaacggatttccttactggggccagggaaccttggtcaccgtgtcttccggcggctccgagggcaagagcagcggcagcggcagcgagagcaagagcaccggcggcagcgaaatcgttctcacacagagccctgcaacattgtcagcttcacccggtgaacgagtaacattgtcctgttctgcctcaagtagtgtgagctatatgaattggtatcaacaaaaaccagggcaggcccctagaaggtggatctatgattcaagcaaactggcatccggcgtccctgcccgctttagtggaagcggttcaggaagggactatactcttactatctccagccttgaacctgaagattttgcagtctactactgccaacaatggtctaggaatccccccacttttggtggagggaccaaagttgagatcaaag

SEQ ID NO: 196 - DNA, 1434 bp, Artificial Sequence
  source: /note="Description of Artificial Sequence: Synthetic polynucleotide"
caagtgcaactcgtacaatctggcgctgaggttaagaaacctggtagctctgttaaagtgtcttgtaaagcatccgggtatacttttacccggtcaactatgcactgggtaaaacaagctcctggacaaggtttggagtggatgggttatataaatccctcctcagcatacactaactacaaccagaagttccaggggcgcgttaccctgactgccgataagagtacttcaactgcttatatggagctgtcatccctgcgtagcgaggacacagcagtatactactgcgccagtccacaggtacactacgattacagtggctttccatactgggggcagggcactctggtaacagtatctagtggcggctccgagggcaagagcagcggcagcggcagcgagagcaagagcaccggcggcagcgagattgtactcacccagtctccagctacccttagtgcttcacctggtgagcgcgtgacattgtcctgctccgcaagctccagtgtttcatatatgaattggtaccaacaaaagcctgggcaagcaccacgccggctgatctacgacagctccaagctcgcaagcggtgtacctgctcgcttttccggcagcgggtcaggtcgagattatactctgaccatttcatcactcgaacccgaagactttgcagtgtattactgtcaacagtggagtaggaatccaccaacatttgggggtggcaccaaggttgagataaaggagcccaaatctagcgacaaaactcacacatgtccaccgtgcccagcacctgaagcagcagggggaccgtcagtcttcctcttccccccaaaacccaaggacaccctcatgatctcccggacccctgaggtcacatgcgtggtggtgagcgtgagccacgaagaccctgaggtcaagttcaactggtacgtggacggcgtggaggtgcataatgccaagacaaagccgcgggaggagcagtacaacagcacgtaccgtgtggtcagcgtcctcaccgtcctgcaccaggactggctgaatggcaaggagtacaagtgcaaggtctccaacaaagccctcccagcccccatcgagaaaaccatctccaaagccaaagggcagccccgagaaccacaggtgtacgtgtaccccccatcccgggaggagatgaccaagaaccaggtcagcctgacctgcctggtcaaaggcttctatcccagcgacatcgccgtggagtgggagagcaatgggcagccggagaacaactacaagaccacgcctcccgtgctggactccgacggctccttcgccctcgtgagcaagctcaccgtggacaagtctagatggcagcaggggaacgtcttctcatgctccgtgatgcatgaggctctgcacaaccactacacgcagaagagcctctccctgtctccgggt

SEQ ID NO: 197 - DNA, 742 bp, Artificial Sequence
  source: /note="Description of Artificial Sequence: Synthetic polynucleotide"
caagtgcaactcgtacaatctggcgctgaggttaagaaacctggtagctctgttaaagtgtcttgtaaagcatccgggtatacttttacccggtcaactatgcactgggtaaaacaagctcctggacaaggtttggagtggatgggttatataaatccctcctcagcatacactaactacaaccagaagttccaggggcgcgttaccctgactgccgataagagtacttcaactgcttatatggagctgtcatccctgcgtagcgaggacacagcagtatactactgcgccagtccacaggtacactacgattacagtggctttccatactgggggcagggcactctggtaacagtatctagtggcggctccgagggcaagagcagcggcagcggcagcgagagcaagagcaccggcggcagcgagattgtactcacccagtctccagctacccttagtgcttcacctggtgagcgcgtgacattgtcctgctccgcaagctccagtgtttcatatatgaattggtaccaacaaaagcctgggcaagcaccacgccggctgatctacgacagctccaagctcgcaagcggtgtacctgctcgcttttccggcagcgggtcaggtcgagattatactctgaccatttcatcactcgaacccgaagactttgcagtgtattactgtcaacagtggagtaggaatccaccaacatttgggggtggcaccaaggttgagataaagg

SEQ ID NO: 198 - DNA, 1434 bp, Artificial Sequence
  source: /note="Description of Artificial Sequence: Synthetic polynucleotide"
caggtacagttggtccaaagtggcgcagaggtaaagaaaccaggttcttcagtcaaggtaagttgcaaggcatctggatatacatttacccgcagtactatgcattgggtcaaacaggctccaggacaggggcttgaatggatgggttacatcaacccatctagtgcctatacaaactataatcagaaatttcagggcagagtgactctgacagccgacaaatcaacctctacagcatatatggagttgtcctctctccgtagtgaagatactgccgtctactattgtgcaagcccccaagtccactatgattatcagggtttcccttactgggggcagggtactttggttaccgtttcatccggcggctccgagggcaagagcagcggcagcggcagcgagagcaagagcaccggcggcagcgagatcgtgttgactcaaagtcctgcaaccctgtctgctagtccaggggagagggttactctcagttgttctgcaagcagtagcgtatcctacatgaactggtatcaacaaaagcctggtcaggcaccacggcggttgatatatgactcctccaagttggcctctggggtgcccgcaagattctccgggtccggctctggccgcgattacacactgactataagcagtctggaaccagaggattttgccgtttactactgccaacaatggagccgaaaccccccaacctttggaggtggcactaaggtagagataaaggagcccaaatctagcgacaaaactcacacatgtccaccgtgcccagcacctgaagcagcagggggaccgtcagtcttcctcttccccccaaaacccaaggacaccctcatgatctcccggacccctgaggtcacatgcgtggtggtgagcgtgagccacgaagaccctgaggtcaagttcaactggtacgtggacggcgtggaggtgcataatgccaagacaaagccgcgggaggagcagtacaacagcacgtaccgtgtggtcagcgtcctcaccgtcctgcaccaggactggctgaatggcaaggagtacaagtgcaaggtctccaacaaagccctcccagcccccatcgagaaaaccatctccaaagccaaagggcagccccgagaaccacaggtgtacgtgtaccccccatcccgggaggagatgaccaagaaccaggtcagcctgacctgcctggtcaaaggcttctatcccagcgacatcgccgtggagtgggagagcaatgggcagccggagaacaactacaagaccacgcctcccgtgctggactccgacggctccttcgccctcgtgagcaagctcaccgtggacaagtctagatggcagcaggggaacgtcttctcatgctccgtgatgcatgaggctctgcacaaccactacacgcagaagagcctctccctgtctccgggt

SEQ ID NO: 199 - DNA, 742 bp, Artificial Sequence
  source: /note="Description of Artificial Sequence: Synthetic polynucleotide"
caggtacagttggtccaaagtggcgcagaggtaaagaaaccaggttcttcagtcaaggtaagttgcaaggcatctggatatacatttacccgcagtactatgcattgggtcaaacaggctccaggacaggggcttgaatggatgggttacatcaacccatctagtgcctatacaaactataatcagaaatttcagggcagagtgactctgacagccgacaaatcaacctctacagcatatatggagttgtcctctctccgtagtgaagatactgccgtctactattgtgcaagcccccaagtccactatgattatcagggtttcccttactgggggcagggtactttggttaccgtttcatccggcggctccgagggcaagagcagcggcagcggcagcgagagcaagagcaccggcggcagcgagatcgtgttgactcaaagtcctgcaaccctgtctgctagtccaggggagagggttactctcagttgttctgcaagcagtagcgtatcctacatgaactggtatcaacaaaagcctggtcaggcaccacggcggttgatatatgactcctccaagttggcctctggggtgcccgcaagattctccgggtccggctctggccgcgattacacactgactataagcagtctggaaccagaggattttgccgtttactactgccaacaatggagccgaaaccccccaacctttggaggtggcactaaggtagagataaagg

SEQ ID NO: 200 - DNA, 1434 bp, Artificial Sequence
  source: /note="Description of Artificial Sequence: Synthetic polynucleotide"
caagttcaactggtccaaagcggtgctgaagttaaaaagccaggaagcagtgttaaagtctcatgtaaggccagcggttacacttttactaggagtaccatgcactgggtgaagcaggcccccggtcagggtcttgagtggatgggatatataaacccatcatccgcctacactaattacaaccaaaagtttcagggtcgcgtgactttgaccgccgacaaatctaccagcacagcctacatggaactcagttctctccgatccgaagataccgctgtatattactgtgcttccccacaagtacactatgattacgggggcttcccatactggggccagggaactctcgtcacagtatcatccggcggctccgagggcaagagcagcggcagcggcagcgagagcaagagcaccggcggcagcgaaattgttcttacacaaagtcctgctacactgtcagccagccccggtgagcgagtcacattgtcatgctctgcttccagtagtgtgagctacatgaactggtaccaacagaaacctggtcaggctccaaggcgcttgatatacgacagcagcaaactggcaagtggtgtacctgctcggttttctggatcaggctcaggtagagactatactctcaccatttcctctctggaacctgaggactttgctgtttattattgccagcagtggagtcgcaaccctcccaccttcggtggagggacaaaagtagaaataaaggagcccaaatctagcgacaaaactcacacatgtccaccgtgcccagcacctgaagcagcagggggaccgtcagtcttcctcttccccccaaaacccaaggacaccctcatgatctcccggacccctgaggtcacatgcgtggtggtgagcgtgagccacgaagaccctgaggtcaagttcaactggtacgtggacggcgtggaggtgcataatgccaagacaaagccgcgggaggagcagtacaacagcacgtaccgtgtggtcagcgtcctcaccgtcctgcaccaggactggctgaatggcaaggagtacaagtgcaaggtctccaacaaagccctcccagcccccatcgagaaaaccatctccaaagccaaagggcagccccgagaaccacaggtgtacgtgtaccccccatcccgggaggagatgaccaagaaccaggtcagcctgacctgcctggtcaaaggcttctatcccagcgacatcgccgtggagtgggagagcaatgggcagccggagaacaactacaagaccacgcctcccgtgctggactccgacggctccttcgccctcgtgagcaagctcaccgtggacaagtctagatggcagcaggggaacgtcttctcatgctccgtgatgcatgaggctctgcacaaccactacacgcagaagagcctctccctgtctccgggt

SEQ ID NO: 201 - DNA, 742 bp, Artificial Sequence
  source: /note="Description of Artificial Sequence: Synthetic polynucleotide"
caagttcaactggtccaaagcggtgctgaagttaaaaagccaggaagcagtgttaaagtctcatgtaaggccagcggttacacttttactaggagtaccatgcactgggtgaagcaggcccccggtcagggtcttgagtggatgggatatataaacccatcatccgcctacactaattacaaccaaaagtttcagggtcgcgtgactttgaccgccgacaaatctaccagcacagcctacatggaactcagttctctccgatccgaagataccgctgtatattactgtgcttccccacaagtacactatgattacgggggcttcccatactggggccagggaactctcgtcacagtatcatccggcggctccgagggcaagagcagcggcagcggcagcgagagcaagagcaccggcggcagcgaaattgttcttacacaaagtcctgctacactgtcagccagccccggtgagcgagtcacattgtcatgctctgcttccagtagtgtgagctacatgaactggtaccaacagaaacctggtcaggctccaaggcgcttgatatacgacagcagcaaactggcaagtggtgtacctgctcggttttctggatcaggctcaggtagagactatactctcaccatttcctctctggaacctgaggactttgctgtttattattgccagcagtggagtcgcaaccctcccaccttcggtggagggacaaaagtagaaataaagg

SEQ ID NO: 202 - DNA, 1434 bp, Artificial Sequence
  source: /note="Description of Artificial Sequence: Synthetic polynucleotide"
caagttcagttggttcaatccggcgctgaggtcaaaaaacctggatcatctgtgaaagtctcatgtaaggcatctggttataccttcactcggagtaccatgcattgggttaagcaggcccccggtcaggggttggagtggatgggttacatcaacccttcctcagcctacacaaattataatcagaaatttcaggggcgcgttactctcaccgctgacaagtccacctccacagcctatatggagctgtcaagcctgcggagtgaggatacagccgtatattactgtgccagtcctcaggttcattatgattacgctggcttcccatattggggtcaggggactctcgtcactgtgtccagcggcggctccgagggcaagagcagcggcagcggcagcgagagcaagagcaccggcggcagcgaaattgtattgactcagtccccagctacattgagcgcaagtcctggcgagagagtaaccctgtcttgttctgccagtagtagtgtaagctacatgaactggtatcagcagaaacccggacaggccccacgccgacttatctatgattcaagtaagctcgctagtggggttccagccagatttagtggttctggctctggacgcgattacactctgaccatttcttctctggagcctgaggacttcgcagtatattactgccaacaatggtcacgcaatccaccaacattcggtggagggacaaaagtggaaatcaaagagcccaaatctagcgacaaaactcacacatgtccaccgtgcccagcacctgaagcagcagggggaccgtcagtcttcctcttccccccaaaacccaaggacaccctcatgatctcccggacccctgaggtcacatgcgtggtggtgagcgtgagccacgaagaccctgaggtcaagttcaactggtacgtggacggcgtggaggtgcataatgccaagacaaagccgcgggaggagcagtacaacagcacgtaccgtgtggtcagcgtcctcaccgtcctgcaccaggactggctgaatggcaaggagtacaagtgcaaggtctccaacaaagccctcccagcccccatcgagaaaaccatctccaaagccaaagggcagccccgagaaccacaggtgtacgtgtaccccccatcccgggaggagatgaccaagaaccaggtcagcctgacctgcctggtcaaaggcttctatcccagcgacatcgccgtggagtgggagagcaatgggcagccggagaacaactacaagaccacgcctcccgtgctggactccgacggctccttcgccctcgtgagcaagctcaccgtggacaagtctagatggcagcaggggaacgtcttctcatgctccgtgatgcatgaggctctgcacaaccactacacgcagaagagcctctccctgtctccgggt

SEQ ID NO: 203 - DNA, 742 bp, Artificial Sequence
  source: /note="Description of Artificial Sequence: Synthetic polynucleotide"
caagttcagttggttcaatccggcgctgaggtcaaaaaacctggatcatctgtgaaagtctcatgtaaggcatctggttataccttcactcggagtaccatgcattgggttaagcaggcccccggtcaggggttggagtggatgggttacatcaacccttcctcagcctacacaaattataatcagaaatttcaggggcgcgttactctcaccgctgacaagtccacctccacagcctatatggagctgtcaagcctgcggagtgaggatacagccgtatattactgtgccagtcctcaggttcattatgattacgctggcttcccatattggggtcaggggactctcgtcactgtgtccagcggcggctccgagggcaagagcagcggcagcggcagcgagagcaagagcaccggcggcagcgaaattgtattgactcagtccccagctacattgagcgcaagtcctggcgagagagtaaccctgtcttgttctgccagtagtagtgtaagctacatgaactggtatcagcagaaacccggacaggccccacgccgacttatctatgattcaagtaagctcgctagtggggttccagccagatttagtggttctggctctggacgcgattacactctgaccatttcttctctggagcctgaggacttcgcagtatattactgccaacaatggtcacgcaatccaccaacattcggtggagggacaaaagtggaaatcaaag

SEQ ID NO: 204 - DNA, 1434 bp, Artificial Sequence
  source: /note="Description of Artificial Sequence: Synthetic polynucleotide"
caagtgcagttggtgcagagtggggctgaggttaaaaagcctggttccagtgtgaaagtcagttgtaaagcctccgggtacacttttactaggtcaacaatgcactgggtcaagcaagcccccggccaaggcttggaatggatggggtacataaatccaagcagtgcctacaccaactataaccaaaaatttcaaggtagagtaacattgactgctgacaagtccacatcaactgcttatatggagctgtcctctcttcggtctgaagataccgccgtatactattgcgcctccccccaagtccactacgactataacggatttccctactggggacaaggaaccctggtaacagtttcttcaggcggctccgagggcaagagcagcggcagcggcagcgagagcaagagcaccggcggcagcgagatagttcttacacagagccctgcaaccttgagtgcaagtccaggggaacgggtgactctgagttgtagtgcttctagttccgtaagttatatgaactggtaccaacagaagccaggtcaagcaccaagacgccttatctacgactcatctaaacttgctagtggagtgccagccagattttccggttcaggaagtgggagggactacacacttaccatctcatcccttgagcccgaagatttcgccgtatattactgtcaacaatggtcaagaaatcctcctacatttggtggtggtacaaaagtagagatcaaggagcccaaatctagcgacaaaactcacacatgtccaccgtgcccagcacctgaagcagcagggggaccgtcagtcttcctcttccccccaaaacccaaggacaccctcatgatctcccggacccctgaggtcacatgcgtggtggtgagcgtgagccacgaagaccctgaggtcaagttcaactggtacgtggacggcgtggaggtgcataatgccaagacaaagccgcgggaggagcagtacaacagcacgtaccgtgtggtcagcgtcctcaccgtcctgcaccaggactggctgaatggcaaggagtacaagtgcaaggtctccaacaaagccctcccagcccccatcgagaaaaccatctccaaagccaaagggcagccccgagaaccacaggtgtacgtgtaccccccatcccgggaggagatgaccaagaaccaggtcagcctgacctgcctggtcaaaggcttctatcccagcgacatcgccgtggagtgggagagcaatgggcagccggagaacaactacaagaccacgcctcccgtgctggactccgacggctccttcgccctcgtgagcaagctcaccgtggacaagtctagatggcagcaggggaacgtcttctcatgctccgtgatgcatgaggctctgcacaaccactacacgcagaagagcctctccctgtctccgggt

SEQ ID NO: 205 - DNA, 742 bp, Artificial Sequence
  source: /note="Description of Artificial Sequence: Synthetic polynucleotide"
caagtgcagttggtgcagagtggggctgaggttaaaaagcctggttccagtgtgaaagtcagttgtaaagcctccgggtacacttttactaggtcaacaatgcactgggtcaagcaagcccccggccaaggcttggaatggatggggtacataaatccaagcagtgcctacaccaactataaccaaaaatttcaaggtagagtaacattgactgctgacaagtccacatcaactgcttatatggagctgtcctctcttcggtctgaagataccgccgtatactattgcgcctccccccaagtccactacgactataacggatttccctactggggacaaggaaccctggtaacagtttcttcaggcggctccgagggcaagagcagcggcagcggcagcgagagcaagagcaccggcggcagcgagatagttcttacacagagccctgcaaccttgagtgcaagtccaggggaacgggtgactctgagttgtagtgcttctagttccgtaagttatatgaactggtaccaacagaagccaggtcaagcaccaagacgccttatctacgactcatctaaacttgctagtggagtgccagccagattttccggttcaggaagtgggagggactacacacttaccatctcatcccttgagcccgaagatttcgccgtatattactgtcaacaatggtcaagaaatcctcctacatttggtggtggtacaaaagtagagatcaagg

SEQ ID NO: 206 - DNA, 1434 bp, Artificial Sequence
  source: /note="Description of Artificial Sequence: Synthetic polynucleotide"
caagtacagctcgttcagtccggtgcagaagtcaagaaaccaggaagtagcgtaaaagtgtcatgtaaagcaagtggttatacctttacacgctcaactatgcattgggttaagcaggctccaggacaagggcttgagtggataggatacatcaatccatctagcgcctacacaaattataaccagaagttccaggggagagttaccctcactgccgataagtccacatcaaccgcctatatggaattgagttcccttcgtagtgaggacactgccgtctactactgtgcctcccctcaggttcattatgattactcaggttttccatactggggccagggcaccctcgtaacagtaagcagcggcggctccgagggcaagagcagcggcagcggcagcgagagcaagagcaccggcggcagcgaaattgtcctgactcagtctccagccacactgagtgcatctcccggcgagcgggtcactcttagttgcagcgccagttctagtgtatcatatatgaactggtatcagcaaaagccaggtcaagctcccaggcgatggatatacgactcatcaaaactcgcctctggcgtcccagcccggttctccggttccggctctgggcgcgactatacccttacaatttctagcctcgaaccagaagattttgctgtatattattgtcaacagtggtcacgtaacccaccaaccttcggtggagggacaaaggtcgagataaaagagcccaaatctagcgacaaaactcacacatgtccaccgtgcccagcacctgaagcagcagggggaccgtcagtcttcctcttccccccaaaacccaaggacaccctcatgatctcccggacccctgaggtcacatgcgtggtggtgagcgtgagccacgaagaccctgaggtcaagttcaactggtacgtggacggcgtggaggtgcataatgccaagacaaagccgcgggaggagcagtacaacagcacgtaccgtgtggtcagcgtcctcaccgtcctgcaccaggactggctgaatggcaaggagtacaagtgcaaggtctccaacaaagccctcccagcccccatcgagaaaaccatctccaaagccaaagggcagccccgagaaccacaggtgtacgtgtaccccccatcccgggaggagatgaccaagaaccaggtcagcctgacctgcctggtcaaaggcttctatcccagcgacatcgccgtggagtgggagagcaatgggcagccggagaacaactacaagaccacgcctcccgtgctggactccgacggctccttcgccctcgtgagcaagctcaccgtggacaagtctagatggcagcaggggaacgtcttctcatgctccgtgatgcatgaggctctgcacaaccactacacgcagaagagcctctccctgtctccgggt

SEQ ID NO: 207 - DNA, 742 bp, Artificial Sequence
  source: /note="Description of Artificial Sequence: Synthetic polynucleotide"
caagtacagctcgttcagtccggtgcagaagtcaagaaaccaggaagtagcgtaaaagtgtcatgtaaagcaagtggttatacctttacacgctcaactatgcattgggttaagcaggctccaggacaagggcttgagtggataggatacatcaatccatctagcgcctacacaaattataaccagaagttccaggggagagttaccctcactgccgataagtccacatcaaccgcctatatggaattgagttcccttcgtagtgaggacactgccgtctactactgtgcctcccctcaggttcattatgattactcaggttttccatactggggccagggcaccctcgtaacagtaagcagcggcggctccgagggcaagagcagcggcagcggcagcgagagcaagagcaccggcggcagcgaaattgtcctgactcagtctccagccacactgagtgcatctcccggcgagcgggtcactcttagttgcagcgccagttctagtgtatcatatatgaactggtatcagcaaaagccaggtcaagctcccaggcgatggatatacgactcatcaaaactcgcctctggcgtcccagcccggttctccggttccggctctgggcgcgactatacccttacaatttctagcctcgaaccagaagattttgctgtatattattgtcaacagtggtcacgtaacccaccaaccttcggtggagggacaaaggtcgagataaaag

SEQ ID NO: 208 - DNA, 1434 bp, Artificial Sequence
  source: /note="Description of Artificial Sequence: Synthetic polynucleotide"
caggtgcaactggtacaaagtggtgccgaggtgaagaagccagggtccagtgtgaaagtatcatgtaaagccagcgggtacacattcactaggagcactatgcactgggtaaagcaagccccagggcaaggtttggagtggatcggttatattaacccttcatctgcttatacaaattacaatcagaaattccaagggagggtcactttgaccgctgacaagtctacctctactgcatacatggaactctccagccttcgttcagaagacacagccgtttattactgtgcctccccacaggtacactacgactacggtggattcccatattggggtcaaggcacccttgtaacagtatcaagcggcggctccgagggcaagagcagcggcagcggcagcgagagcaagagcaccggcggcagcgaaattgtactcacacaaagtcctgcaactttgtctgcctcaccaggggaaagagtaactcttagttgtagtgctagttcatccgtttcttatatgaattggtatcagcagaaacccggacaagcaccccggcggtggatatacgattccagtaaacttgcaagcggagtccccgcacgtttcagcggcagtggctcaggccgggactataccctgactatttcctccttggaacctgaggattttgctgtgtactactgtcagcaatggagtagaaatcctcccacctttggaggtggcactaaagtagagatcaaagagcccaaatctagcgacaaaactcacacatgtccaccgtgcccagcacctgaagcagcagggggaccgtcagtcttcctcttccccccaaaacccaaggacaccctcatgatctcccggacccctgaggtcacatgcgtggtggtgagcgtgagccacgaagaccctgaggtcaagttcaactggtacgtggacggcgtggaggtgcataatgccaagacaaagccgcgggaggagcagtacaacagcacgtaccgtgtggtcagcgtcctcaccgtcctgcaccaggactggctgaatggcaaggagtacaagtgcaaggtctccaacaaagccctcccagcccccatcgagaaaaccatctccaaagccaaagggcagccccgagaaccacaggtgtacgtgtaccccccatcccgggaggagatgaccaagaaccaggtcagcctgacctgcctggtcaaaggcttctatcccagcgacatcgccgtggagtgggagagcaatgggcagccggagaacaactacaagaccacgcctcccgtgctggactccgacggctccttcgccctcgtgagcaagctcaccgtggacaagtctagatggcagcaggggaacgtcttctcatgctccgtgatgcatgaggctctgcacaaccactacacgcagaagagcctctccctgtctccgggt

SEQ ID NO: 209 - DNA, 742 bp, Artificial Sequence
  source: /note="Description of Artificial Sequence: Synthetic polynucleotide"
caggtgcaactggtacaaagtggtgccgaggtgaagaagccagggtccagtgtgaaagtatcatgtaaagccagcgggtacacattcactaggagcactatgcactgggtaaagcaagccccagggcaaggtttggagtggatcggttatattaacccttcatctgcttatacaaattacaatcagaaattccaagggagggtcactttgaccgctgacaagtctacctctactgcatacatggaactctccagccttcgttcagaagacacagccgtttattactgtgcctccccacaggtacactacgactacggtggattcccatattggggtcaaggcacccttgtaacagtatcaagcggcggctccgagggcaagagcagcggcagcggcagcgagagcaagagcaccggcggcagcgaaattgtactcacacaaagtcctgcaactttgtctgcctcaccaggggaaagagtaactcttagttgtagtgctagttcatccgtttcttatatgaattggtatcagcagaaacccggacaagcaccccggcggtggatatacgattccagtaaacttgcaagcggagtccccgcacgtttcagcggcagtggctcaggccgggactataccctgactatttcctccttggaacctgaggattttgctgtgtactactgtcagcaatggagtagaaatcctcccacctttggaggtggcactaaagtagagatcaaag

SEQ ID NO: 210 - DNA, 1434 bp, Artificial Sequence
  source: /note="Description of Artificial Sequence: Synthetic polynucleotide"
caagtgcaactcgtgcaaagcggggctgaagtgaagaagcctggatcaagcgtgaaggtcagttgcaaagcctctggatataccttcactcgatcaaccatgcactgggtcaagcaggccccagggcaagggctcgaatggataggatatattaacccaagttctgcctacactaactataatcagaagtttcaaggccgggtaacacttacagccgataagagtacctcaacagcatacatggaacttagttctttgcggagcgaggataccgctgtgtattactgcgcttcacctcaggttcactacgactacgctggatttccctattggggtcagggtacactggttacagtttcctctggcggctccgagggcaagagcagcggcagcggcagcgagagcaagagcaccggcggcagcgaaattgttttgacccaatcacctgccactctctctgcctctcctggtgagcgagttactttgtcatgtagcgcatcatcaagtgtatcttacatgaactggtaccaacaaaaacccggacaggcaccacgtcgttggatttatgacagtagcaagctcgcctccggggtacccgcaagattttccgggtcagggtctggcagggactataccctgacaatcagcagtctggaacctgaggactttgctgtgtattactgccaacagtggtctcgcaacccccctactttcgggggaggtacaaaggtagaaattaaggagcccaaatctagcgacaaaactcacacatgtccaccgtgcccagcacctgaagcagcagggggaccgtcagtcttcctcttccccccaaaacccaaggacaccctcatgatctcccggacccctgaggtcacatgcgtggtggtgagcgtgagccacgaagaccctgaggtcaagttcaactggtacgtggacggcgtggaggtgcataatgccaagacaaagccgcgggaggagcagtacaacagcacgtaccgtgtggtcagcgtcctcaccgtcctgcaccaggactggctgaatggcaaggagtacaagtgcaaggtctccaacaaagccctcccagcccccatcgagaaaaccatctccaaagccaaagggcagccccgagaaccacaggtgtacgtgtaccccccatcccgggaggagatgaccaagaaccaggtcagcctgacctgcctggtcaaaggcttctatcccagcgacatcgccgtggagtgggagagcaatgggcagccggagaacaactacaagaccacgcctcccgtgctggactccgacggctccttcgccctcgtgagcaagctcaccgtggacaagtctagatggcagcaggggaacgtcttctcatgctccgtgatgcatgaggctctgcacaaccactacacgcagaagagcctctccctgtctccgggt

SEQ ID NO: 211 - DNA, 742 bp, Artificial Sequence
  source: /note="Description of Artificial Sequence: Synthetic polynucleotide"
caagtgcaactcgtgcaaagcggggctgaagtgaagaagcctggatcaagcgtgaaggtcagttgcaaagcctctggatataccttcactcgatcaaccatgcactgggtcaagcaggccccagggcaagggctcgaatggataggatatattaacccaagttctgcctacactaactataatcagaagtttcaaggccgggtaacacttacagccgataagagtacctcaacagcatacatggaacttagttctttgcggagcgaggataccgctgtgtattactgcgcttcacctcaggttcactacgactacgctggatttccctattggggtcagggtacactggttacagtttcctctggcggctccgagggcaagagcagcggcagcggcagcgagagcaagagcaccggcggcagcgaaattgttttgacccaatcacctgccactctctctgcctctcctggtgagcgagttactttgtcatgtagcgcatcatcaagtgtatcttacatgaactggtaccaacaaaaacccggacaggcaccacgtcgttggatttatgacagtagcaagctcgcctccggggtacccgcaagattttccgggtcagggtctggcagggactataccctgacaatcagcagtctggaacctgaggactttgctgtgtattactgccaacagtggtctcgcaacccccctactttcgggggaggtacaaaggtagaaattaagg

SEQ ID NO: 212 - DNA, 1434 bp, Artificial Sequence
  source: /note="Description of Artificial Sequence: Synthetic polynucleotide"
caagttcagttggttcaatccggcgcagaggttaaaaaacccggatcaagcgttaaggttagttgtaaagcctctggctacactttcacacgctcaacaatgcattgggttaagcaggcccctgggcagggactggagtggatcggttacataaacccatccagcgcctatacaaactataaccagaagttccaagggcgggttacattgaccgctgacaagtccactagcacagcatatatggagctgtcaagtctgagatccgaagacactgccgtatattattgcgctagtccacaagtgcactatgactataacggttttccctattggggacaaggaaccctggtgaccgttagctccggcggctccgagggcaagagcagcggcagcggcagcgagagcaagagcaccggcggcagcgaaattgtcttgacccagtctccagcaactcttagtgcatcaccaggtgagcgtgttaccctctcatgtagcgccagctcatctgttagttatatgaattggtatcaacagaaaccagggcaagctcccagaagatggatatatgattcttcaaaactcgcaagtggtgtcccagcccgcttctcaggctctggttccggtcgcgattatactctcaccatcagtagtttggaacccgaagatttcgccgtctattattgccagcaatggagcaggaatccccccacattcggcggcggtacaaaggttgagattaaggagcccaaatctagcgacaaaactcacacatgtccaccgtgcccagcacctgaagcagcagggggaccgtcagtcttcctcttccccccaaaacccaaggacaccctcatgatctcccggacccctgaggtcacatgcgtggtggtgagcgtgagccacgaagaccctgaggtcaagttcaactggtacgtggacggcgtggaggtgcataatgccaagacaaagccgcgggaggagcagtacaacagcacgtaccgtgtggtcagcgtcctcaccgtcctgcaccaggactggctgaatggcaaggagtacaagtgcaaggtctccaacaaagccctcccagcccccatcgagaaaaccatctccaaagccaaagggcagccccgagaaccacaggtgtacgtgtaccccccatcccgggaggagatgaccaagaaccaggtcagcctgacctgcctggtcaaaggcttctatcccagcgacatcgccgtggagtgggagagcaatgggcagccggagaacaactacaagaccacgcctcccgtgctggactccgacggctccttcgccctcgtgagcaagctcaccgtggacaagtctagatggcagcaggggaacgtcttctcatgctccgtgatgcatgaggctctgcacaaccactacacgcagaagagcctctccctgtctccgggt

SEQ ID NO: 213 - DNA, 742 bp, Artificial Sequence
  source: /note="Description of Artificial Sequence: Synthetic polynucleotide"
caagttcagttggttcaatccggcgcagaggttaaaaaacccggatcaagcgttaaggttagttgtaaagcctctggctacactttcacacgctcaacaatgcattgggttaagcaggcccctgggcagggactggagtggatcggttacataaacccatccagcgcctatacaaactataaccagaagttccaagggcgggttacattgaccgctgacaagtccactagcacagcatatatggagctgtcaagtctgagatccgaagacactgccgtatattattgcgctagtccacaagtgcactatgactataacggttttccctattggggacaaggaaccctggtgaccgttagctccggcggctccgagggcaagagcagcggcagcggcagcgagagcaagagcaccggcggcagcgaaattgtcttgacccagtctccagcaactcttagtgcatcaccaggtgagcgtgttaccctctcatgtagcgccagctcatctgttagttatatgaattggtatcaacagaaaccagggcaagctcccagaagatggatatatgattcttcaaaactcgcaagtggtgtcccagcccgcttctcaggctctggttccggtcgcgattatactctcaccatcagtagtttggaacccgaagatttcgccgtctattattgccagcaatggagcaggaatccccccacattcggcggcggtacaaaggttgagattaagg

SEQ ID NO: 214 - DNA, 1434 bp, Artificial Sequence
  source: /note="Description of Artificial Sequence: Synthetic polynucleotide"
gagatcgttctgacacagtctcccgcaaccctcagcgcttcacccggtgagcgtgtcactctgagctgttccgctagtagtagcgttagctacatgaactggtatcaacaaaagccaggacaggcacccaggcgatggatttacgattcatcaaaactggcaagcggagtgcctgctcgttttagtgggtccgggtctggccgcgattacaccctgaccatatcatccctcgaacctgaggacttcgcagtttattattgccaacagtggagtaggaacccacctacattcggtggggggaccaaagtcgagataaaaggcggctccgagggcaagagcagcggcagcggcagcgagagcaagagcaccggcggcagccaggtacaactcgtacagagcggagctgaggtgaaaaaacccggtagttccgttaaggttagctgtaaggctagcggatacacttttactcgatctacaatgcactgggttaaacaggctcccggccagggtttggaatggatcggatacatcaaccccagtagtgcctataccaattacaatcaaaagtttcaaggcagagtgaccctgaccgctgacaaatccacaagtaccgcatatatggagctctcaagtttgcgaagtgaagatactgctgtatattattgcgcaagccctcaagttcactatgactatcaagggtttccttactggggtcagggaacactggtcacagtatcatccgagcccaaatctagcgacaaaactcacacatgtccaccgtgcccagcacctgaagcagcagggggaccgtcagtcttcctcttccccccaaaacccaaggacaccctcatgatctcccggacccctgaggtcacatgcgtggtggtgagcgtgagccacgaagaccctgaggtcaagttcaactggtacgtggacggcgtggaggtgcataatgccaagacaaagccgcgggaggagcagtacaacagcacgtaccgtgtggtcagcgtcctcaccgtcctgcaccaggactggctgaatggcaaggagtacaagtgcaaggtctccaacaaagccctcccagcccccatcgagaaaaccatctccaaagccaaagggcagccccgagaaccacaggtgtacgtgtaccccccatcccgggaggagatgaccaagaaccaggtcagcctgacctgcctggtcaaaggcttctatcccagcgacatcgccgtggagtgggagagcaatgggcagccggagaacaactacaagaccacgcctcccgtgctggactccgacggctccttcgccctcgtgagcaagctcaccgtggacaagtctagatggcagcaggggaacgtcttctcatgctccgtgatgcatgaggctctgcacaaccactacacgcagaagagcctctccctgtctccgggt

SEQ ID NO: 215 - DNA, 742 bp, Artificial Sequence
  source: /note="Description of Artificial Sequence: Synthetic polynucleotide"
gagatcgttctgacacagtctcccgcaaccctcagcgcttcacccggtgagcgtgtcactctgagctgttccgctagtagtagcgttagctacatgaactggtatcaacaaaagccaggacaggcacccaggcgatggatttacgattcatcaaaactggcaagcggagtgcctgctcgttttagtgggtccgggtctggccgcgattacaccctgaccatatcatccctcgaacctgaggacttcgcagtttattattgccaacagtggagtaggaacccacctacattcggtggggggaccaaagtcgagataaaaggcggctccgagggcaagagcagcggcagcggcagcgagagcaagagcaccggcggcagccaggtacaactcgtacagagcggagctgaggtgaaaaaacccggtagttccgttaaggttagctgtaaggctagcggatacacttttactcgatctacaatgcactgggttaaacaggctcccggccagggtttggaatggatcggatacatcaaccccagtagtgcctataccaattacaatcaaaagtttcaaggcagagtgaccctgaccgctgacaaatccacaagtaccgcatatatggagctctcaagtttgcgaagtgaagatactgctgtatattattgcgcaagccctcaagttcactatgactatcaagggtttccttactggggtcagggaacactggtcacagtatcatccg

SEQ ID NO: 216 - DNA, 1434 bp, Artificial Sequence
  source: /note="Description of Artificial Sequence: Synthetic polynucleotide"
caggtacaactcgtacagagcggagctgaggtgaaaaaacccggtagttccgttaaggttagctgtaaggctagcggatacacttttactcgatctacaatgcactgggttaaacaggctcccggccagggtttggaatggatcggatacatcaaccccagtagtgcctataccaattacaatcaaaagtttcaaggcagagtgaccctgaccgctgacaaatccacaagtaccgcatatatggagctctcaagtttgcgaagtgaagatactgctgtatattattgcgcaagccctcaagttcactatgactatcaagggtttccttactggggtcagggaacactggtcacagtatcatccggcggctccgagggcaagagcagcggcagcggcagcgagagcaagagcaccggcggcagcgagatcgttctgacacagtctcccgcaaccctcagcgcttcacccggtgagcgtgtcactctgagctgttccgctagtagtagcgttagctacatgaactggtatcaacaaaagccaggacaggcacccaggcgatggatttacgattcatcaaaactggcaagcggagtgcctgctcgttttagtgggtccgggtctggccgcgattacaccctgaccatatcatccctcgaacctgaggacttcgcagtttattattgccaacagtggagtaggaacccacctacattcggtggggggaccaaagtcgagataaaagagcccaaatctagcgacaaaactcacacatgtccaccgtgcccagcacctgaagcagcagggggaccgtcagtcttcctcttccccccaaaacccaaggacaccctcatgatctcccggacccctgaggtcacatgcgtggtggtgagcgtgagccacgaagaccctgaggtcaagttcaactggtacgtggacggcgtggaggtgcataatgccaagacaaagccgcgggaggagcagtacaacagcacgtaccgtgtggtcagcgtcctcaccgtcctgcaccaggactggctgaatggcaaggagtacaagtgcaaggtctccaacaaagccctcccagcccccatcgagaaaaccatctccaaagccaaagggcagccccgagaaccacaggtgtacgtgtaccccccatcccgggaggagatgaccaagaaccaggtcagcctgacctgcctggtcaaaggcttctatcccagcgacatcgccgtggagtgggagagcaatgggcagccggagaacaactacaagaccacgcctcccgtgctggactccgacggctccttcgccctcgtgagcaagctcaccgtggacaagtctagatggcagcaggggaacgtcttctcatgctccgtgatgcatgaggctctgcacaaccactacacgcagaagagcctctccctgtctccgggt

SEQ ID NO: 217 - DNA, 742 bp, Artificial Sequence
  source: /note="Description of Artificial Sequence: Synthetic polynucleotide"
caggtacaactcgtacagagcggagctgaggtgaaaaaacccggtagttccgttaaggttagctgtaaggctagcggatacacttttactcgatctacaatgcactgggttaaacaggctcccggccagggtttggaatggatcggatacatcaaccccagtagtgcctataccaattacaatcaaaagtttcaaggcagagtgaccctgaccgctgacaaatccacaagtaccgcatatatggagctctcaagtttgcgaagtgaagatactgctgtatattattgcgcaagccctcaagttcactatgactatcaagggtttccttactggggtcagggaacactggtcacagtatcatccggcggctccgagggcaagagcagcggcagcggcagcgagagcaagagcaccggcggcagcgagatcgttctgacacagtctcccgcaaccctcagcgcttcacccggtgagcgtgtcactctgagctgttccgctagtagtagcgttagctacatgaactggtatcaacaaaagccaggacaggcacccaggcgatggatttacgattcatcaaaactggcaagcggagtgcctgctcgttttagtgggtccgggtctggccgcgattacaccctgaccatatcatccctcgaacctgaggacttcgcagtttattattgccaacagtggagtaggaacccacctacattcggtggggggaccaaagtcgagataaaag

SEQ ID NO: 218 - DNA, 1434 bp, Artificial Sequence
  source: /note="Description of Artificial Sequence: Synthetic polynucleotide"
caggtgcagctggtgcagagcggcgcggaagtgaaaaaaccgggcagcagcgtgaaagtgagctgcaaagcgagcggctatacctttacccgcagcaccatgcattgggtgaaacaggcgccgggccagggcctggaatggattggctatattaacccgagcagcgcgtataccaactataaccagaaatttcagggccgcgtgaccctgaccgcggataaaagcaccagcaccgcgtatatggaactgagcagcctgcgcagcgaagataccgcggtgtattattgcgcgagcccgcaggtgcattatgattatcagggctttccgtattggggccagggcaccctggtgaccgtgagcagcggcggcagcgaaggcaaaagcagcggcagcggcagcgaaagcaaaagcaccggcggcagcgaaattgtgctgacccagagcccggcgaccctgagcgcgagcccgggcgaacgcgtgaccctgagctgcagcgcgagcagcagcgtgagctatatgaactggtatcagcagaaaccgggccagagcccgcgccgctggatttatgatagcagcaaactggcgagcggcgtgccggcgcgctttagcggcagcggcagcggccgcgattataccctgaccattagcagcctggaaccggaagattttgcggtgtattattgccagcagtggagccgcaacccgccgacctttggcggcggcaccaaagtggaaattaaagaaccgaaaagcagcgataaaacccatacctgcccgccgtgcccggcgccggaagcggcgggcggcccgagcgtgtttctgtttccgccgaaaccgaaagataccctgatgattagccgcaccccggaagtgacctgcgtggtggtgagcgtgagccatgaagatccggaagtgaaatttaactggtatgtggatggcgtggaagtgcataacgcgaaaaccaaaccgcgcgaagaacagtataacagcacctatcgcgtggtgagcgtgctgaccgtgctgcatcaggattggctgaacggcaaagaatataaatgcaaagtgagcaacaaagcgctgccggcgccgattgaaaaaaccattagcaaagcgaaaggccagccgcgcgaaccgcaggtgtatgtgtatccgccgagccgcgaagaaatgaccaaaaaccaggtgagcctgacctgcctggtgaaaggcttttatccgagcgatattgcggtggaatgggaaagcaacggccagccggaaaacaactataaaaccaccccgccggtgctggatagcgatggcagctttgcgctggtgagcaaactgaccgtggataaaagccgctggcagcagggcaacgtgtttagctgcagcgtgatgcatgaagcgctgcataaccattatacccagaaaagcctgagcctgagcccgggc

SEQ ID NO: 219 - DNA, 741 bp, Artificial Sequence
  source: /note="Description of Artificial Sequence: Synthetic polynucleotide"
caggtgcagctggtgcagagcggcgcggaagtgaaaaaaccgggcagcagcgtgaaagtgagctgcaaagcgagcggctatacctttacccgcagcaccatgcattgggtgaaacaggcgccgggccagggcctggaatggattggctatattaacccgagcagcgcgtataccaactataaccagaaatttcagggccgcgtgaccctgaccgcggataaaagcaccagcaccgcgtatatggaactgagcagcctgcgcagcgaagataccgcggtgtattattgcgcgagcccgcaggtgcattatgattatcagggctttccgtattggggccagggcaccctggtgaccgtgagcagcggcggcagcgaaggcaaaagcagcggcagcggcagcgaaagcaaaagcaccggcggcagcgaaattgtgctgacccagagcccggcgaccctgagcgcgagcccgggcgaacgcgtgaccctgagctgcagcgcgagcagcagcgtgagctatatgaactggtatcagcagaaaccgggccagagcccgcgccgctggatttatgatagcagcaaactggcgagcggcgtgccggcgcgctttagcggcagcggcagcggccgcgattataccctgaccattagcagcctggaaccggaagattttgcggtgtattattgccagcagtggagccgcaacccgccgacctttggcggcggcaccaaagtggaaattaaa

SEQ ID NO: 220 - protein, 330 aa, Artificial Sequence
  source: /note="Description of Artificial Sequence: Synthetic polypeptide"
ASTKGPSVFPLAPSSKSTSGGTAALGCLVKDYFPEPVTVSWNSGALTSGVHTFPAVLQSSGLYSLSSVVTVPSSSLGTQTYICNVNHKPSNTKVDKKVEPKSCDKTHTCPPCPAPEAAGGPSVFLFPPKPKDTLMISRTPEVTCVVVSVSHEDPEVKFNWYVDGVEVHNAKTKPREEQYNSTYRVVSVLTVLHQDWLNGKEYKCKVSNKALPAPIEKTISKAKGQPREPQVYVYPPSREEMTKNQVSLTCLVKGFYPSDIAVEWESNGQPENNYKTTPPVLDSDGSFALVSKLTVDKSRWQQGNVFSCSVMHEALHNHYTQKSLSLSPGK

SEQ ID NO: 221 - protein, 107 aa, Artificial Sequence [sequence omitted]

SEQ ID NO: 222 - protein, 106 aa, Artificial Sequence
  source: /note="Description of Artificial Sequence: Synthetic polypeptide"
GQPKAAPSVTLFPPSSEELQANKATLVCLISDFYPGAVTVAWKADSSPVKAGVETTTPSKQSNNKYAASSYLSLTPEQWKSHRSYSCQVTHEGSTVEKTVAPTECS

SEQ ID NO: 223 - protein, 450 aa, Artificial Sequence
  source: /note="Description of Artificial Sequence: Synthetic polypeptide"
QVQLLQSAAEVKKPGESLKISCKGSGYTFTRSTMHWVRQTPGKGLEWMGYINPSSAYTNYNQKFKDQVTISADKSISTAYLQWSSLKASDTAMYYCARPQVHYDYNGFPYWGQGTLVTVSSASTKGPSVFPLAPSSKSTSGGTAALGCLVKDYFPEPVTVSWNSGALTSGVHTFPAVLQSSGLYSLSSVVTVPSSSLGTQTYICNVNHKPSNTKVDKKVEPKSCDKTHTCPPCPAPEAAGGPSVFLFPPKPKDTLMISRTPEVTCVVVSVSHEDPEVKFNWYVDGVEVHNAKTKPREEQYNSTYRVVSVLTVLHQDWLNGKEYKCKVSNKALPAPIEKTISKAKGQPREPQVYVYPPSREEMTKNQVSLTCLVKGFYPSDIAVEWESNGQPENNYKTTPPVLDSDGSFALVSKLTVDKSRWQQGNVFSCSVMHEALHNHYTQKSLSLSPG

SEQ ID NO: 224 - protein, 450 aa, Artificial Sequence; identical to SEQ ID NO: 93
  source: /note="Description of Artificial Sequence: Synthetic polypeptide"

SEQ ID NO: 225 - protein, 213 aa, Artificial Sequence; identical to SEQ ID NO: 94
  source: /note="Description of Artificial Sequence: Synthetic polypeptide"

SEQ ID NO: 226 - protein, 213 aa, Artificial Sequence; identical to SEQ ID NO: 94
  source: /note="Description of Artificial Sequence: Synthetic polypeptide"

SEQ ID NO: 227 - DNA, 1350 bp, Artificial Sequence
  source: /note="Description of Artificial Sequence: Synthetic polynucleotide"
caggtgcagctgctgcagagcgcggcggaagtgaaaaaaccgggcgaaagcctgaaaattagctgcaaaggcagcggctatacctttacccgcagcaccatgcattgggtgcgccagaccccgggcaaaggcctggaatggatgggctatattaacccgagcagcgcgtataccaactataaccagaaatttaaagatcaggtgaccattagcgcggataaaagcattagcaccgcgtatctgcagtggagcagcctgaaagcgagcgataccgcgatgtattattgcgcgcgcccgcaggtgcattatgattataacggctttccgtattggggccagggcaccctggtgaccgtgagcagcgcctccaccaagggcccatcggtcttccccctggcaccctcctccaagagcacctctgggggcacagcggccctgggctgcctggtcaaggactacttccccgaaccggtgacggtgtcgtggaactcaggcgccctgaccagcggcgtgcacaccttcccggctgtcctacagtcctcaggactctactccctcagcagcgtggtgaccgtgccctccagcagcttgggcacccagacctacatctgcaacgtgaatcacaagcccagcaacaccaaggtggacaagaaagttgagcccaaatcttgtgacaaaactcacacatgtccaccgtgcccagcacctgaagcagcagggggaccgtcagtcttcctcttccccccaaaacccaaggacaccctcatgatctcccggacccctgaggtcacatgcgtggtggtgagcgtgagccacgaagaccctgaggtcaagttcaactggtacgtggacggcgtggaggtgcataatgccaagacaaagccgcgggaggagcagtacaacagcacgtaccgtgtggtcagcgtcctcaccgtcctgcaccaggactggctgaatggcaaggagtacaagtgcaaggtctccaacaaagccctcccagcccccatcgagaaaaccatctccaaagccaaagggcagccccgagaaccacaggtgtacgtgtaccccccatcccgggaggagatgaccaagaaccaggtcagcctgacctgcctggtcaaaggcttctatcccagcgacatcgccgtggagtgggagagcaatgggcagccggagaacaactacaagaccacgcctcccgtgctggactccgacggctccttcgccctcgtgagcaagctcaccgtggacaagtctagatggcagcaggggaacgtcttctcatgctccgtgatgcatgaggctctgcacaaccactacacgcagaagagcctctccctgtctccgggt

SEQ ID NO: 228 - DNA, 639 bp, Artificial Sequence
  source: /note="Description of Artificial Sequence: Synthetic polynucleotide"
gaaattgtgctgacccagagcccgagcgcgatgagcgcgagcgtgggcgatcgcgtgaccattacctgcagcgcgagcagcagcgtgagctatatgaactggtatcagcagaaaccgggcaaagtgccgaaacgcctgatttatgatagcagcaaactggcgagcggcgtgccgagccgctttagcggcagcggcagcggcaccgaatataccctgaccattagcagcctgcagccggaagattttgcgacctattattgccagcagtggagccgcaacccgccgacctttggccagggcaccatgctggaaattaaacgtacggtggctgcaccatctgtcttcatcttcccgccatctgatgagcagttgaaatctggaactgcctctgttgtgtgcctgctgaataacttctatcccagagaggccaaagtacagtggaaggtggataacgccctccaatcgggtaactcccaggagagtgtcacagagcaggacagcaaggacagcacctacagcctcagcagcaccctgacgctgagcaaagcagactacgagaaacacaaagtctacgcctgcgaagtcacccatcagggcctgagctcgcccgtcacaaagagcttcaacaggggagagtgt

SEQ ID NO: 229 - DNA, 1350 bp, Artificial Sequence
  source: /note="Description of Artificial Sequence: Synthetic polynucleotide"
caagtgcaactccttcagtcagccgccgaggttaaaaaaccaggagaatcactgaaaatctcctgtaagggtagcggatataccttcactagatcaaccatgcattgggtgagacagactccaggtaaaggattggagtggatgggatacataaacccctcctcagcctataccaattacaatcaaaaatttaaggatcaagtgactatcagtgctgacaagagcatctcaaccgcctaccttcagtggtcatcactgaaagcatcagatacagccatgtattactgtgcaagaccccaagttcactatgactatcagggtttcccatactgggggcaaggaacactcgtgaccgtttcatctgcctccaccaagggcccatcggtcttccccctggcaccctcctccaagagcacctctgggggcacagcggccctgggctgcctggtcaaggactacttccccgaaccggtgacggtgtcgtggaactcaggcgccctgaccagcggcgtgcacaccttcccggctgtcctacagtcctcaggactctactccctcagcagcgtggtgaccgtgccctccagcagcttgggcacccagacctacatctgcaacgtgaatcacaagcccagcaacaccaaggtggacaagaaagttgagcccaaatcttgtgacaaaactcacacatgtccaccgtgcccagcacctgaagcagcagggggaccgtcagtcttcctcttccccccaaaacccaaggacaccctcatgatctcccggacccctgaggtcacatgcgtggtggtgagcgtgagccacgaagaccctgaggtcaagttcaactggtacgtggacggcgtggaggtgcataatgccaagacaaagccgcgggaggagcagtacaacagcacgtaccgtgtggtcagcgtcctcaccgtcctgcaccaggactggctgaatggcaaggagtacaagtgcaaggtctccaacaaagccctcccagcccccatcgagaaaaccatctccaaagccaaagggcagccccgagaaccacaggtgtacgtgtaccccccatcccgggaggagatgaccaagaaccaggtcagcctgacctgcctggtcaaaggcttctatcccagcgacatcgccgtggagtgggagagcaatgggcagccggagaacaactacaagaccacgcctcccgtgctggactccgacggctccttcgccctcgtgagcaagctcaccgtggacaagtctagatggcagcaggggaacgtcttctcatgctccgtgatgcatgaggctctgcacaaccactacacgcagaagagcctctccctgtctccgggt

SEQ ID NO: 230 - protein, 330 aa, Artificial Sequence
  source: /note="Description of Artificial Sequence: Synthetic polypeptide"
ASTKGPSVFPLAPSSKSTSGGTAALGCLVKDYFPEPVTVSWNSGALTSGVHTFPAVLQSSGLYSLSSVVTVPSSSLGTQTYICNVNHKPSNTKVDKKVEPKSCDKTHTCPPCPAPEAAGGPSVFLFPPKPKDTLMISRTPEVTCVVVSVSHEDPEVKFNWYVDGVEVHNAKTKPREEQYNSTYRVVSVLTVLHQDWLNGKEYKCKVSNKALPAPIEKTISKAKGQPREPQVYVLPPSREEMTKNQVSLLCLVKGFYPSDIAVEWESNGQPENNYLTWPPVLDSDGSFFLYSKLTVDKSRWQQGNVFSCSVMHEALHNHYTQKSLSLSPGK

SEQ ID NO: 231 - protein, 107 aa, Artificial Sequence [sequence omitted]

SEQ ID NO: 232 - protein, 106 aa, Artificial Sequence; identical to SEQ ID NO: 222
  source: /note="Description of Artificial Sequence: Synthetic polypeptide"

SEQ ID NO: 233 - protein, 452 aa, Artificial Sequence
  source: /note="Description of Artificial Sequence: Synthetic polypeptide"
EVQLLESGGGLVQPGGSLRLSCAASGFTFSSYAMSWVRQAPGKGLEWVSAISGSGGSTYYADSVKGRFTISRDNSKNTLYLQMNSLRAEDTAVYYCAKDEGYSSGHYYGMDVWGQGTTVTVSSASTKGPSVFPLAPSSKSTSGGTAALGCLVKDYFPEPVTVSWNSGALTSGVHTFPAVLQSSGLYSLSSVVTVPSSSLGTQTYICNVNHKPSNTKVDKKVEPKSCDKTHTCPPCPAPEAAGGPSVFLFPPKPKDTLMISRTPEVTCVVVSVSHEDPEVKFNWYVDGVEVHNAKTKPREEQYNSTYRVVSVLTVLHQDWLNGKEYKCKVSNKALPAPIEKTISKAKGQPREPQVYVLPPSREEMTKNQVSLLCLVKGFYPSDIAVEWESNGQPENNYLTWPPVLDSDGSFFLYSKLTVDKSRWQQGNVFSCSVMHEALHNHYTQKSLSLSPG

SEQ ID NO: 234 - protein, 216 aa, Artificial Sequence
  source: /note="Description of Artificial Sequence: Synthetic polypeptide"
EIVLTQSPGTLSLSPGERATLSCRASQSISSSFLTWYQQKPGQAPRLLIYGASSRATGIPDRFSGGGSGTDFTLTISRLEPEDFAVYYCQHYGSSPMYTFGQGTKLEIKRTVAAPSVFIFPPSDEQLKSGTASVVCLLNNFYPREAKVQWKVDNALQSGNSQESVTEQDSKDSTYSLSSTLTLSKADYEKHKVYACEVTHQGLSSPVTKSFNRGEC

SEQ ID NO: 235 - protein, 231 aa, Artificial Sequence
  source: /note="Description of Artificial Sequence: Synthetic polypeptide"
EPKSSDKTHTCPPCPAPEAAGGPSVFLFPPKPKDTLMISRTPEVTCVVVSVSHEDPEVKFNWYVDGVEVHNAKTKPREEQYNSTYRVVSVLTVLHQDWLNGKEYKCKVSNKALPAPIEKTISKAKGQPREPQVYVLPPSREEMTKNQVSLLCLVKGFYPSDIAVEWESNGQPENNYLTWPPVLDSDGSFFLYSKLTVDKSRWQQGNVFSCSVMHEALHNHYTQKSLSLSPG

SEQ ID NO: 236 - protein, 452 aa, Artificial Sequence; identical to SEQ ID NO: 233
  source: /note="Description of Artificial Sequence: Synthetic polypeptide"

SEQ ID NO: 237 - protein, 330 aa, Homo sapiens [sequence omitted]

SEQ ID NO: 238 - protein, 326 aa, Homo sapiens
ASTKGPSVFPLAPCSRSTSESTAALGCLVKDYFPEPVTVSWNSGALTSGVHTFPAVLQSSGLYSLSSVVTVPSSNFGTQTYTCNVDHKPSNTKVDKTVERKCCVECPPCPAPPVAGPSVFLFPPKPKDTLMISRTPEVTCVVVDVSHEDPEVQFNWYVDGVEVHNAKTKPREEQFNSTFRVVSVLTVVHQDWLNGKEYKCKVSNKGLPAPIEKTISKTKGQPREPQVYTLPPSREEMTKNQVSLTCLVKGFYPSDISVEWESNGQPENNYKTTPPMLDSDGSFFLYSKLTVDKSRWQQGNVFSCSVMHEALHNHYTQKSLSLSPGK

SEQ ID NO: 239 - protein, 327 aa, Homo sapiens
ASTKGPSVFPLAPCSRSTSESTAALGCLVKDYFPEPVTVSWNSGALTSGVHTFPAVLQSSGLYSLSSVVTVPSSSLGTKTYTCNVDHKPSNTKVDKRVESKYGPPCPSCPAPEFLGGPSVFLFPPKPKDTLMISRTPEVTCVVVDVSQEDPEVQFNWYVDGVEVHNAKTKPREEQFNSTYRVVSVLTVLHQDWLNGKEYKCKVSNKGLPSSIEKTISKAKGQPREPQVYTLPPSQEEMTKNQVSLTCLVKGFYPSDIAVEWESNGQPENNYKTTPPVLDSDGSFFLYSRLTVDKSRWQEGNVFSCSVMHEALHNHYTQKSLSLSLGK

SEQ ID NO: 240 - protein, 750 aa, Homo sapiens
MWNLLHETDSAVATARRPRWLCAGALVLAGGFFLLGFLFGWFIKSSNEATNITPKHNMKAFLDELKAENIKKFLYNFTQIPHLAGTEQNFQLAKQIQSQWKEFGLDSVELAHYDVLLSYPNKTHPNYISIINEDGNEIFNTSLFEPPPPGYENVSDIVPPFSAFSPQGMPEGDLVYVNYARTEDFFKLERDMKINCSGKIVIARYGKVFRGNKVKNAQLAGAKGVILYSDPADYFAPGVKSYPDGWNLPGGGVQRGNILNLNGAGDPLTPGYPANEYAYRRGIAEAVGLPSIPVHPIGYYDAQKLLEKMGGSAPPDSSWRGSLKVPYNVGPGFTGNFSTQKVKMHIHSTNEVTRIYNVIGTLRGAVEPDRYVILGGHRDSWVFGGIDPQSGAAVVHEIVRSFGTLKKEGWRPRRTILFASWDAEEFGLLGSTEWAEENSRLLQERGVAYINADSSIEGNYTLRVDCTPLMYSLVHNLTKELKSPDEGFEGKSLYESWTKKSPSPEFSGMPRISKLGSGNDFEVFFQRLGIASGRARYTKNWETNKFSGYPLYHSVYETYELVEKFYDPMFKYHLTVAQVRGGMVFELANSIVLPFDCRDYAVVLRKYADKIYSISMKHPQEMKTYSVSFDSLFSAVKNFTEIASKFSERLQDFDKSNPIVLRMMNDQLMFLERAFIDPLGLPDRPFYRHVIYAPSSHNKYAGESFPGIYDALFDIESKVDPSKAWGEVKRQIYVAAFTVQAAAETLSEVA

SEQ ID NO: 241 - protein, 229 aa, Homo sapiens
MARLALSPVPSHWMVALLLLLSAEPVPAARSEDRYRNPKGSACSRIWQSPRFIARKRGFTVKMHCYMNSASGNVSWLWKQEMDENPQQLKLEKGRMEESQNESLATLTIQGIRFEDNGIYFCQQKCNNTSEVYQGCGTELRVMGFSTLAQLKQRNTLKDGIIMIQTLLIILFIIVPIFLLLDKDDSKAGMEEDHTYEGLDIDQTATYEDIVTLRTGEVKWSVGEHPGQE

SEQ ID NO: 242 - protein, 121 aa, Artificial Sequence
  source: /note="Description of Artificial Sequence: Synthetic polypeptide"
QVQLVQSGAEVKKPGSSVKVSCKASGYTFTRSTMHWVRQAPGQGLEWMGYINPSSAYTNYAQKFQGRVTLTADKSTSTAYMELSSLRSEDTAVYYCASPQVHYDYGGFPYWGQGTLVTVSS

SEQ ID NO: 243-252 - skipped (10 entries)

SEQ ID NO: 253 - protein, 13 aa, Homo sapiens
SEDRYRNPKGSAC

SEQ ID NO: 254 - protein, 5 aa, Homo sapiens
EMENP

SEQ ID NO: 255 - protein, 5 aa, Homo sapiens
GFSTL

SEQ ID NO: 256-1187 - skipped (932 entries)

SEQ ID NO: 1188 - protein, 450 aa, Artificial Sequence
  source: /note="Description of Artificial Sequence: Synthetic polypeptide"
QVQLQQSGPRLVRPSQTLSLTCAISGDSVFNNNAAWSWIRQSPSRGLEWLGRTYYRSKWLYDYAVSVKSRITVNPDTSRNQFTLQLNSVTPEDTALYYCARGYSSSFDYWGQGTLVTVSSASTKGPSVFPLAPSSKSTSGGTAALGCLVKDYFPEPVTVSWNSGALTSGVHTFPAVLQSSGLYSLSSVVTVPSSSLGTQTYICNVNHKPSNTKVDKKVEPKSCDKTHTCPPCPAPEAAGGPSVFLFPPKPKDTLMISRTPEVTCVVVSVSHEDPEVKFNWYVDGVEVHNAKTKPREEQYNSTYRVVSVLTVLHQDWLNGKEYKCKVSNKALPAPIEKTISKAKGQPREPQVYTLPPSREEMTKNQVSLTCLVKGFYPSDIAVEWESNGQPENNYKTTPPVLDSDGSFLLYSKLTVDKSRWQQGNVFSCSVMHEALHNHYTQKSLSLSPGK

SEQ ID NO: 1189 - protein, 216 aa, Artificial Sequence
  source: /note="Description of Artificial Sequence: Synthetic polypeptide"
QSALTQPASVSGSPGQSITISCTGTSSNIGTYKFVSWYQQHPDKAPKVLLYEVSKRPSGVSSRFSGSKSGNTASLTISGLQAEDQADYHCVSYAGSGTLLFGGGTKLTVLGQPKAAPSVTLFPPSSEELQANKATLVCLISDFYPGAVTVAWKADSSPVKAGVETTTPSKQSNNKYAASSYLSLTPEQWKSHRSYSCQVTHEGSTVEKTVAPTECS

SEQ ID NO: 1190 - protein, 450 aa, Artificial Sequence; identical to SEQ ID NO: 1188
  source: /note="Description of Artificial Sequence: Synthetic polypeptide"

SEQ ID NO: 1191 - protein, 216 aa, Artificial Sequence; identical to SEQ ID NO: 1189
  source: /note="Description of Artificial Sequence: Synthetic polypeptide"

SEQ ID NO: 1192 - protein, 475 aa, Artificial Sequence
  source: /note="Description of Artificial Sequence: Synthetic polypeptide"
DIQMTQSPSSLSASVGDRVTITCRARQSIGTAIHWYQQKPGKAPKLLIKYASESISGVPSRFSGSGSGTDFTLTISSLQPEDFATYYCQQSGSWPYTFGQGTKLEIKGGSEGKSSGSGSESKSTGGSEVQLVESGGGLVKPGGSLRLSCAASGFTFSRYNMNWVRQAPGKGLEWVSSISTSSNYIYYADSVKGRFTFSRDNAKNSLDLQMSGLRAEDTAIYYCTRGWGPFDYWGQGTLVTVSSEPKSSDKTHTCPPCPAPEAAGGPSVFLFPPKPKDTLMISRTPEVTCVVVSVSHEDPEVKFNWYVDGVEVHNAKTKPREEQYNSTYRVVSVLTVLHQDWLNGKEYKCKVSNKALPAPIEKTISKAKGQPREPQVYTLPPSREEMTKNQVSLWCLVKGFYPSDIAVEWESNGQPENNYKTTPPVLDSDGSFFLYSKLTVDKSRWQQGNVFSCSVMHEALHNHYTQKSLSLSPGK

SEQ ID NO: 1193 - skipped

SEQ ID NO: 1194 - protein, 449 aa, Artificial Sequence
  source: /note="Description of Artificial Sequence: Synthetic polypeptide"
QVQLQQSGPRLVRPSQTLSLTCAISGDSVFNNNAAWSWIRQSPSRGLEWLGRTYYRSKWLYDYAVSVKSRITVNPDTSRNQFTLQLNSVTPEDTALYYCARGYSSSFDYWGQGTLVTVSSASTKGPSVFPLAPSSKSTSGGTAALGCLVKDYFPEPVTVSWNSGALTSGVHTFPAVLQSSGLYSLSSVVTVPSSSLGTQTYICNVNHKPSNTKVDKKVEPKSCDKTHTCPPCPAPEAAGGPSVFLFPPKPKDTLMISRTPEVTCVVVSVSHEDPEVKFNWYVDGVEVHNAKTKPREEQYNSTYRVVSVLTVLHQDWLNGKEYKCKVSNKALPAPIEKTISKAKGQPREPQVYVYPPSREEMTKNQVSLTCLVKGFYPSDIAVEWESNGQPENNYKTTPPVLDSDGSFALVSKLTVDKSRWQQGNVFSCSVMHEALHNRFTQKSLSLSPG

SEQ ID NO: 1195 - protein, 217 aa, Artificial Sequence
  source: /note="Description of Artificial Sequence: Synthetic polypeptide"
QSALTQPASVSGSPGQSITISCTGTSSNIGTYKFVSWYQQHPDKAPKVLLYEVSKRPSGVSSRFSGSKSGNTASLTISGLQAEDQADYHCVSYAGSGTLLFGGGTKLTVLRTVAAPSVFIFPPSDEQLKSGTASVVCLLNNFYPREAKVQWKVDNALQSGNSQESVTEQDSKDSTYSLSSTLTLSKADYEKHKVYACEVTHQGLSSPVTKSFNRGEC

SEQ ID NO: 1196 - protein, 449 aa, Artificial Sequence; identical to SEQ ID NO: 1194
  source: /note="Description of Artificial Sequence: Synthetic polypeptide"

SEQ ID NO: 1197 - protein, 217 aa, Artificial Sequence; identical to SEQ ID NO: 1195
  source: /note="Description of Artificial Sequence: Synthetic polypeptide"

SEQ ID NO: 1198 - protein, 449 aa, Artificial Sequence; identical to SEQ ID NO: 1194
  source: /note="Description of Artificial Sequence: Synthetic polypeptide"

SEQ ID NO: 1199 - protein, 217 aa, Artificial Sequence; identical to SEQ ID NO: 1195
  source: /note="Description of Artificial Sequence: Synthetic polypeptide"

SEQ ID NO: 1200 - protein, 449 aa, Artificial Sequence; identical to SEQ ID NO: 1194
  source: /note="Description of Artificial Sequence: Synthetic polypeptide"

SEQ ID NO: 1201 - protein, 217 aa, Artificial Sequence; identical to SEQ ID NO: 1195
  source: /note="Description of Artificial Sequence: Synthetic polypeptide"

SEQ ID NO: 1202 - protein, 449 aa, Artificial Sequence; identical to SEQ ID NO: 1194
  source: /note="Description of Artificial Sequence: Synthetic polypeptide"

SEQ ID NO: 1203 - protein, 217 aa, Artificial Sequence; identical to SEQ ID NO: 1195
  source: /note="Description of Artificial Sequence: Synthetic polypeptide"

SEQ ID NO: 1204 - protein, 449 aa, Artificial Sequence; identical to SEQ ID NO: 1194
  source: /note="Description of Artificial Sequence: Synthetic polypeptide"

SEQ ID NO: 1205 - protein, 217 aa, Artificial Sequence; identical to SEQ ID NO: 1195
  source: /note="Description of Artificial Sequence: Synthetic polypeptide"

SEQ ID NO: 1206 - protein, 449 aa, Artificial Sequence; identical to SEQ ID NO: 1194
  source: /note="Description of Artificial Sequence: Synthetic polypeptide"

SEQ ID NO: 1207 - protein, 217 aa, Artificial Sequence; identical to SEQ ID NO: 1195
  source: /note="Description of Artificial Sequence: Synthetic polypeptide"

SEQ ID NO: 1208 - protein, 449 aa, Artificial Sequence; identical to SEQ ID NO: 1194
  source: /note="Description of Artificial Sequence: Synthetic polypeptide"

SEQ ID NO: 1209 - protein, 217 aa, Artificial Sequence; identical to SEQ ID NO: 1195
  source: /note="Description of Artificial Sequence: Synthetic polypeptide"

SEQ ID NO: 1210 - protein, 449 aa, Artificial Sequence; identical to SEQ ID NO: 1194
  source: /note="Description of Artificial Sequence: Synthetic polypeptide"

SEQ ID NO: 1211 - protein, 217 aa, Artificial Sequence; identical to SEQ ID NO: 1195
  source: /note="Description of Artificial Sequence: Synthetic polypeptide"

SEQ ID NO: 1212 - protein, 449 aa, Artificial Sequence; identical to SEQ ID NO: 1194
  source: /note="Description of Artificial Sequence: Synthetic polypeptide"

SEQ ID NO: 1213 - protein, 217 aa, Artificial Sequence; identical to SEQ ID NO: 1195
  source: /note="Description of Artificial Sequence: Synthetic polypeptide"

SEQ ID NO: 1214 - protein, 449 aa, Artificial Sequence; identical to SEQ ID NO: 1194
  source: /note="Description of Artificial Sequence: Synthetic polypeptide"

SEQ ID NO: 1215 - protein, 217 aa, Artificial Sequence; identical to SEQ ID NO: 1195
  source: /note="Description of Artificial Sequence: Synthetic polypeptide"

SEQ ID NO: 1216 - protein, 449 aa, Artificial Sequence; identical to SEQ ID NO: 1194
  source: /note="Description of Artificial Sequence: Synthetic polypeptide"

SEQ ID NO: 1217 - protein, 217 aa, Artificial Sequence; identical to SEQ ID NO: 1195
  source: /note="Description of Artificial Sequence: Synthetic polypeptide"

SEQ ID NO: 1218 - protein, 449 aa, Artificial Sequence
  source: /note="Description of Artificial Sequence: Synthetic polypeptide"
QITLKESGPTLVKPTQTLTLTCTFSGFSLSTSGMGVSWIRQPPGKALEWLAHIYWDDDKRYNPSLKSRLTITKDTSKNQVVLTMTNMDPVDTATYYCARLYGFTYGFAYWGQGTLVTVSSASTKGPSVFPLAPSSKSTSGGTAALGCLVKDYFPEPVTVSWNSGALTSGVHTFPAVLQSSGLYSLSSVVTVPSSSLGTQTYICNVNHKPSNTKVDKKVEPKSCDKTHTCPPCPAPELLGGPSVFLFPPKPKDTLMISRTPEVTCVVVDVSHEDPEVKFNWYVDGVEVHNAKTKPREEQYNSTYRVVSVLTVLHQDWLNGKEYKCKVSNKALPAPIEKTISKAKGQPREPQVYVYPPSREEMTKNQVSLTCLVKGFYPSDIAVEWESNGQPENNYKTTPPVLDSDGSFALVSKLTVDKSRWQQGNVFSCSVMHEALHNRFTQKSLSLSPG

SEQ ID NO: 1219 - protein, 218 aa, Artificial Sequence
  source: /note="Description of Artificial Sequence: Synthetic polypeptide"
DIVMTQSPDSLAVSLGERATINCRASQSVDYNGISYMHWYQQKPGQPPKLLIYAASNPESGVPDRFSGSGSGTDFTLTISSLQAEDVAVYYCQQIIEDPWTFGQGTKVEIKRTVAAPSVFIFPPSDEQLKSGTASVVCLLNNFYPREAKVQWKVDNALQSGNSQESVTEQDSKDSTYSLSSTLTLSKADYEKHKVYACEVTHQGLSSPVTKSFNRGEC

SEQ ID NO: 1220 - protein, 449 aa, Artificial Sequence; identical to SEQ ID NO: 1218
  source: /note="Description of Artificial Sequence: Synthetic polypeptide"

SEQ ID NO: 1221 - protein, 218 aa, Artificial Sequence; identical to SEQ ID NO: 1219
  source: /note="Description of Artificial Sequence: Synthetic polypeptide"

SEQ ID NO: 1222 - protein, 449 aa, Artificial Sequence; identical to SEQ ID NO: 1218
  source: /note="Description of Artificial Sequence: Synthetic polypeptide"

SEQ ID NO: 1223 - protein, 218 aa, Artificial Sequence; identical to SEQ ID NO: 1219
  source: /note="Description of Artificial Sequence: Synthetic polypeptide"

SEQ ID NO: 1224 - protein, 449 aa, Artificial Sequence; identical to SEQ ID NO: 1218
  source: /note="Description of Artificial Sequence: Synthetic polypeptide"

SEQ ID NO: 1225 - protein, 218 aa, Artificial Sequence; identical to SEQ ID NO: 1219
  source: /note="Description of Artificial Sequence: Synthetic polypeptide"

SEQ ID NO: 1226 - protein, 449 aa, Artificial Sequence; identical to SEQ ID NO: 1218
  source: /note="Description of Artificial Sequence: Synthetic polypeptide"

SEQ ID NO: 1227 - protein, 218 aa, Artificial Sequence; identical to SEQ ID NO: 1219
  source: /note="Description of Artificial Sequence: Synthetic polypeptide"

SEQ ID NO: 1228 - protein, 449 aa, Artificial Sequence; identical to SEQ ID NO: 1218
  source: /note="Description of Artificial Sequence: Synthetic polypeptide"

SEQ ID NO: 1229 - protein, 218 aa, Artificial Sequence; identical to SEQ ID NO: 1219
  source: /note="Description of Artificial Sequence: Synthetic polypeptide"

SEQ ID NO: 1230 - protein, 449 aa, Artificial Sequence; identical to SEQ ID NO: 1218
  source: /note="Description of Artificial Sequence: Synthetic polypeptide"

SEQ ID NO: 1231 - protein, 218 aa, Artificial Sequence; identical to SEQ ID NO: 1219
  source: /note="Description of Artificial Sequence: Synthetic polypeptide"

SEQ ID NO: 1232 - protein, 449 aa, Artificial Sequence; identical to SEQ ID NO: 1218
  source: /note="Description of Artificial Sequence: Synthetic polypeptide"

SEQ ID NO: 1233 - protein, 218 aa, Artificial Sequence; identical to SEQ ID NO: 1219
  source: /note="Description of Artificial Sequence: Synthetic polypeptide"

SEQ ID NO: 1234 - protein, 449 aa, Artificial Sequence; identical to SEQ ID NO: 1218
  source: /note="Description of Artificial Sequence: Synthetic polypeptide"

SEQ ID NO: 1235 - protein, 218 aa, Artificial Sequence; identical to SEQ ID NO: 1219
  source: /note="Description of Artificial Sequence: Synthetic polypeptide"

SEQ ID NO: 1236 - protein, 449 aa, Artificial Sequence; identical to SEQ ID NO: 1218
  source: /note="Description of Artificial Sequence: Synthetic polypeptide"

SEQ ID NO: 1237 - protein, 218 aa, Artificial Sequence; identical to SEQ ID NO: 1219
  source: /note="Description of Artificial Sequence: Synthetic polypeptide"

SEQ ID NO: 1238 - protein, 449 aa, Artificial Sequence
  source: /note="Description of Artificial Sequence: Synthetic polypeptide"
QITLKESGPTLVKPTQTLTLTCTFSGFSLSTSGMGVSWIRQPPGKALEWLAHIYWDDDKRYNPSLKSRLTITKDTSKNQVVLTMTNMDPVDTATYYCARLYGFTYGFAYWGQGTLVTVSSASTKGPSVFPLAPSSKSTSGGTAALGCLVKDYFPEPVTVSWNSGALTSGVHTFPAVLQSSGLYSLSSVVTVPSSSLGTQTYICNVNHKPSNTKVDKKVEPKSCDKTHTCPPCPAPEAAGGPSVFLFPPKPKDTLMISRTPEVTCVVVSVSHEDPEVKFNWYVDGVEVHNAKTKPREEQYNSTYRVVSVLTVLHQDWLNGKEYKCKVSNKALPAPIEKTISKAKGQPREPQVYVYPPSREEMTKNQVSLTCLVKGFYPSDIAVEWESNGQPENNYKTTPPVLDSDGSFALVSKLTVDKSRWQQGNVFSCSVMHEALHNHYTQKSLSLSPG

SEQ ID NO: 1239 - protein, 218 aa, Artificial Sequence; identical to SEQ ID NO: 1219
  source: /note="Description of Artificial Sequence: Synthetic polypeptide"

SEQ ID NO: 1240 - protein, 449 aa, Artificial Sequence; identical to SEQ ID NO: 1238
  source: /note="Description of Artificial Sequence: Synthetic polypeptide"

SEQ ID NO: 1241 - protein, 218 aa, Artificial Sequence; identical to SEQ ID NO: 1219
  source: /note="Description of Artificial Sequence: Synthetic polypeptide"

SEQ ID NO: 1242 - protein, 451 aa, Artificial Sequence
  source: /note="Description of Artificial Sequence: Synthetic polypeptide"
EVQLVESGGGLVQPGGSLRLSCAASGFTFSSYAMSWVRQAPGKGLEWVSAISGGIGSTYYADSVKGRFTISRDNSKNTLWLQMNSLRAEDTAVYYCAKDGVGATPYYFDYWGQGTLVTVSSASTKGPSVFPLAPSSKSTSGGTAALGCLVKDYFPEPVTVSWNSGALTSGVHTFPAVLQSSGLYSLSSVVTVPSSSLGTQTYICNVNHKPSNTKVDKKVEPKSCDKTHTCPPCPAPEAAGGPSVFLFPPKPKDTLMISRTPEVTCVVVSVSHEDPEVKFNWYVDGVEVHNAKTKPREEQYNSTYRVVSVLTVLHQDWLNGKEYKCKVSNKALPAPIEKTISKAKGQPREPQVYTLPPSREEMTKNQVSLTCLVKGFYPSDIAVEWESNGQPENNYKTTPPVLDSDGSFFLYSRLTVDKSRWQQGNVFSCSVMHEALHNHYTQKSLSLSPGK

SEQ ID NO: 1243 - protein, 216 aa, Artificial Sequence
  source: /note="Description of Artificial Sequence: Synthetic polypeptide"
QSVLTQPPSVSAAPGQKVTISCSGSSSNIGINYVSWYQQLPGTAPKLLIYDNNKRPSGIPDRFSGSKSGTSATLGITGLQTGDEADYYCGTWDSSLSAVVFGGGTKLTVLGQPKAAPSVTLFPPSSEELQANKATLVCLISDFYPGAVTVAWKADSSPVKAGVETTTPSKQSNNKYAASSYLSLTPEQWKSHRSYSCQVTHEGSTVEKTVAPTECS

SEQ ID NO: 1244 - protein, 451 aa, Artificial Sequence
  source: /note="Description of Artificial Sequence: Synthetic polypeptide"
EVQLVESGGGLVQPGGSLRLSCAASGFTFSSYAMSWVRQAPGKGLEWVSAISGGIGSTYYADSVKGRFTISRDNSKNTLWLQMNSLRAEDTAVYYCAKDAVGATPYYFDYWGQGTLVTVSSASTKGPSVFPLAPSSKSTSGGTAALGCLVKDYFPEPVTVSWNSGALTSGVHTFPAVLQSSGLYSLSSVVTVPSSSLGTQTYICNVNHKPSNTKVDKKVEPKSCDKTHTCPPCPAPEAAGGPSVFLFPPKPKDTLMISRTPEVTCVVVSVSHEDPEVKFNWYVDGVEVHNAKTKPREEQYNSTYRVVSVLTVLHQDWLNGKEYKCKVSNKALPAPIEKTISKAKGQPREPQVYTLPPSREEMTKNQVSLTCLVKGFYPSDIAVEWESNGQPENNYKTTPPVLDSDGSFFLYSRLTVDKSRWQQGNVFSCSVMHEALHNHYTQKSLSLSPGK

SEQ ID NO: 1245 - protein, 216 aa, Artificial Sequence; identical to SEQ ID NO: 1243
  source: /note="Description of Artificial Sequence: Synthetic polypeptide"

SEQ ID NO: 1246 - protein, 451 aa, Artificial Sequence
  source: /note="Description of Artificial Sequence: Synthetic polypeptide"
EVQLVESGGGLVQPGGSLRLSCAASGFTFSSYAMSWVRQAPGKGLEWVSAISGGIGSTYYADSVKGRFTISRDNSKNTLWLQMNSLRAEDTAVYYCAKDAVGATPYYFDYWGQGTLVTVSSASTKGPSVFPLAPSSKSTSGGTAALGCLVKDYFPEPVTVSWNSGALTSGVHTFPAVLQSSGLYSLSSVVTVPSSSLGTQTYICNVNHKPSNTKVDKKVEPKSCDKTHTCPPCPAPEAAGGPSVFLFPPKPKDTLMISRTPEVTCVVVSVSHEDPEVKFNWYVDGVEVHNAKTKPREEQYNSTYRVVSVLTVLHQDWLNGKEYKCKVSNKALPAPIEKTISKAKGQPREPQVYTLPPSREEMTKNQVSLSCAVKGFYPSDIAVEWESNGQPENNYKTTPPVLDSDGSFFLVSKLTVDKSRWQQGNVFSCSVMHEALHNRFTQKSLSLSPGK

SEQ ID NO: 1247 - protein, 216 aa, Artificial Sequence; identical to SEQ ID NO: 1243
  source: /note="Description of Artificial Sequence: Synthetic polypeptide"

SEQ ID NO: 1248 - protein, 478 aa, Artificial Sequence
  source: /note="Description of Artificial Sequence: Synthetic polypeptide"
SYELMQPPSVSVSPGQTARITCSGDALPKQYAYWYQQKPGQAPVLVIYKDSERPSGIPVRFSGSSSGTTVTLTITGVQAEDEADYYCQSADSSGTYVFGTGTKVTVLGGSEGKSSGSGSESKSTGGSQVQLVESGGGVVQPGRSLRLSCAASGFTFSSYNMNWVRQAPGKGLEWVAIIYYDESNKYYADSVKGRFTISRDISKNTLYLQMNSLRAEDTAVYYCARERGRDYYGMDVWGQGTTVTVSSEPKSSDKTHTCPPCPAPEAAGGPSVFLFPPKPKDTLMISRTPEVTCVVVSVSHEDPEVKFNWYVDGVEVHNAKTKPREEQYNSTYRVVSVLTVLHQDWLNGKEYKCKVSNKALPAPIEKTISKAKGQPREPQVYVLPPSREEMTKNQVSLLCLVKGFYPSDIAVEWESNGQPENNYLTWPPVLDSDGSFFLYSKLTVDKSRWQQGNVFSCSVMHEALHNHYTQKSLSLSPG

SEQ ID NO: 1249 - skipped

SEQ ID NO: 1250 - protein, 487 aa, Artificial Sequence
  source: /note="Description of Artificial Sequence: Synthetic polypeptide"
QSVLTQPASVSGSPGQSITISCTGTSSDVGGYNYVSWYQQHPGKAPKLMIYEVSNRPSGVSNRFSGSKSGNTASLTISGLQAEDEADYYCSSYTSSYTYVFGTGTKLTVLGGSEGKSSGSGSESKSTGGSEVQLVESGGDLVQPGGSLRLSCAASGFTFNNYNMNWVRQAPGKGLEWVSHISTSSSNKYYADSVKGRFSISRDIAKNSMYLQMNSLRDEDTAVYYCAREGVGADYGDYYYYGMDVWGQGTTVTVSSEPKSSDKTHTCPPCPAPEAAGGPSVFLFPPKPKDTLMISRTPEVTCVVVSVSHEDPEVKFNWYVDGVEVHNAKTKPREEQYNSTYRVVSVLTVLHQDWLNGKEYKCKVSNKALPAPIEKTISKAKGQPREPQVYVLPPSREEMTKNQVSLLCLVKGFYPSDIAVEWESNGQPENNYLTWPPVLDSDGSFFLYSKLTVDKSRWQQGNVFSCSVMHEALHNHYTQKSLSLSPG

SEQ ID NO: 1251 - skipped

SEQ ID NO: 1252 - protein, 481 aa, Artificial Sequence
  source: /note="Description of Artificial Sequence: Synthetic polypeptide"
EIVLTQSPGTLSVSPGERATLSCRASQSVRSNLAWYQQKPGQAPRLLIYGASTRATGIPARFSGSGSGTEFTLTISSLQSEDFAVYYCHQYNDWPPYTFGQGTKLEIKGGSEGKSSGSGSESKSTGGSQVQLQESGGGVVQPGRSLRLSCAASGFTFSTYGMHWVRQAPGKGLEWVAFISYDGSNKYYADSVKGRFTISRDNSKHTLYLQMNSLRAEDTAVYYCAGRDNLRFLEWFMDVWGQGTTVTVSSEPKSSDKTHTCPPCPAPEAAGGPSVFLFPPKPKDTLMISRTPEVTCVVVSVSHEDPEVKFNWYVDGVEVHNAKTKPREEQYNSTYRVVSVLTVLHQDWLNGKEYKCKVSNKALPAPIEKTISKAKGQPREPQVYVLPPSREEMTKNQVSLLCLVKGFYPSDIAVEWESNGQPENNYLTWPPVLDSDGSFFLYSKLTVDKSRWQQGNVFSCSVMHEALHNHYTQKSLSLSPG

SEQ ID NO: 1253 - skipped

SEQ ID NO: 1254 - protein, 481 aa, Artificial Sequence
  source: /note="Description of Artificial Sequence: Synthetic polypeptide"
SYELTQPPSVSVAPGQTARITCGGNNIGSKSVHWYQQKPGQAPVLVVYDDSDRPSGIPERFSGSNSGNTATLTISRVEAGDEADYYCQVWDSSTDHVVFGGGTKLTVLGGSEGKSSGSGSESKSTGGSEVQLVESGGGVVQPGRSLRLSCAASGFTFSSYGMNWVRQAPGKGLEWVAVTSYDGSNKYYADSVKGRFTISRDISKNTLYLQMSSLRAEDTAVYYCARDPYSSSWNGAFDIWGPGTMVTVSSEPKSSDKTHTCPPCPAPEAAGGPSVFLFPPKPKDTLMISRTPEVTCVVVSVSHEDPEVKFNWYVDGVEVHNAKTKPREEQYNSTYRVVSVLTVLHQDWLNGKEYKCKVSNKALPAPIEKTISKAKGQPREPQVYVLPPSREEMTKNQVSLLCLVKGFYPSDIAVEWESNGQPENNYLTWPPVLDSDGSFFLYSKLTVDKSRWQQGNVFSCSVMHEALHNHYTQKSLSLSPG

SEQ ID NO: 1255 - skipped

SEQ ID NO: 1256 - protein, 486 aa, Artificial Sequence
  source: /note="Description of Artificial Sequence: Synthetic polypeptide"
QSVLTQPPSASGTPGQGVTISCSGSSSNIGSNTVNWFQQLPGTAPKLLIYSDNQRPSGVPDRFSGSKSGTSASLAISGLQSEDEADYYCAAWDDSLNGYVFGTGTKVTVLGGSEGKSSGSGSESKSTGGSEVQLVESGGGVVQPGRSLRLSCAASGFTFITYGMHWVRQAPGKGLEWVAVVSFDESNKYYADSVKGRFTISRDNSKNTLYLQMNSLRAEDTAVYYCARALRDGNNWDYFNGMDVWGQGTTVTVSSEPKSSDKTHTCPPCPAPEAAGGPSVFLFPPKPKDTLMISRTPEVTCVVVSVSHEDPEVKFNWYVDGVEVHNAKTKPREEQYNSTYRVVSVLTVLHQDWLNGKEYKCKVSNKALPAPIEKTISKAKGQPREPQVYVLPPSREEMTKNQVSLLCLVKGFYPSDIAVEWESNGQPENNYLTWPPVLDSDGSFFLYSKLTVDKSRWQQGNVFSCSVMHEALHNHYTQKSLSLSPG

SEQ ID NO: 1257 - skipped

SEQ ID NO: 1258 - protein, 487 aa, Artificial Sequence
  source: /note="Description of Artificial Sequence: Synthetic polypeptide"
QSVLTQPASVSGSPGQSITISCTGTSSDVGGYNYVSWYQQHPGKAPKLMIYEVSNRPSGVSNRFSGSKSGNTASLTISGLQAEDEADYYCSSYTSSYTYVFGTGTKLTVLGGSEGKSSGSGSESKSTGGSEVQLVESGGDLVQPGGSLRLSCAASGFTFNNYNMNWVRQAPGKGLEWVSHISTSSSNKYYADSVKGRFSISRDIAKNSMYLQMNSLRDEDTAVYYCARDGVGADYGDYYYYGMDVWGQGTTVTVSSEPKSSDKTHTCPPCPAPEAAGGPSVFLFPPKPKDTLMISRTPEVTCVVVSVSHEDPEVKFNWYVDGVEVHNAKTKPREEQYNSTYRVVSVLTVLHQDWLNGKEYKCKVSNKALPAPIEKTISKAKGQPREPQVYVLPPSREEMTKNQVSLLCLVKGFYPSDIAVEWESNGQPENNYLTWPPVLDSDGSFFLYSKLTVDKSRWQQGNVFSCSVMHEALHNHYTQKSLSLSPG

SEQ ID NO: 1259 - skipped

SEQ ID NO: 1260 - protein, 481 aa, Artificial Sequence
  source: /note="Description of Artificial Sequence: Synthetic polypeptide"
QSVLTQPPSVSVAPGQTARITCGGNNSGSKSVHWYQQKPGQAPVLVVYDDSDRPSGIPERFSGSNSGNTATLTISRVEAGDEADYYCQVWDSSSDHGVFGGGTKLTVLGGSEGKSSGSGSESKSTGGSQVQLVESGGGEVQPGRSLRLSCAASGFSFSGYGMHWVRQAPGKGLEWVAVMSYDGSNRFYVDSVRGRFSISRDNSKNTLYLQMNSLRPEDTAVYYCARDTVWGSHPDAFDIWGQGTVVTVSSEPKSSDKTHTCPPCPAPEAAGGPSVFLFPPKPKDTLMISRTPEVTCVVVSVSHEDPEVKFNWYVDGVEVHNAKTKPREEQYNSTYRVVSVLTVLHQDWLNGKEYKCKVSNKALPAPIEKTISKAKGQPREPQVYVLPPSREEMTKNQVSLLCLVKGFYPSDIAVEWESNGQPENNYLTWPPVLDSDGSFFLYSKLTVDKSRWQQGNVFSCSVMHEALHNHYTQKSLSLSPG

SEQ ID NO: 1261 - skipped

SEQ ID NO: 1262 - protein, 478 aa, Artificial Sequence
  source: /note="Description of Artificial Sequence: Synthetic polypeptide"
SYELMQPPSVSVSPGQTARITCSGDALPKQYAYWYQQKPGQAPVLVIYKDSERPSGIPVRFSGSSSGTTVTLTITGVQAEDEADYYCQSADSSGTYVFGTGTKVTVLGGSEGKSSGSGSESKSTGGSQVQLVESGGGVVQPGRSLRLSCAASGFTFSSYNMNWVRQAPGKGLEWVAIIYYDGSNKYYADSVKGRFTISRDISKNTLYLQMNSLRAEDTAVYYCARERGRDYYGMDVWGQGTTVTVSSEPKSSDKTHTCPPCPAPEAAGGPSVFLFPPKPKDTLMISRTPEVTCVVVSVSHEDPEVKFNWYVDGVEVHNAKTKPREEQYNSTYRVVSVLTVLHQDWLNGKEYKCKVSNKALPAPIEKTISKAKGQPREPQVYVLPPSREEMTKNQVSLLCLVKGFYPSDIAVEWESNGQPENNYLTWPPVLDSDGSFFLYSKLTVDKSRWQQGNVFSCSVMHEALHNHYTQKSLSLSPG

SEQ ID NO: 1263 - skipped

SEQ ID NO: 1264 - protein, 479 aa, Artificial Sequence
  source: /note="Description of Artificial Sequence: Synthetic polypeptide"
QSVLTQPPSASGTPGQRVTISCSGSSSNIGSNTVNWYQQLPGTAPKLLIYSSNQRPSGVPDRFSGSKSGTSASLAISGLQSEDEADYYCAAWDDSLNGVVFGGGTKLTVLGGSEGKSSGSGSESKSTGGSEVQLLESGPGLVKPSETLSLTCTVSGGSIISYYWSWIRQPAGKGLEWIGRIYSSGSTNYNPSLKSRVTMSVDTSKNQFSLKLSSVTAADTAVYYCAKVGVWPGAFDIWGQGTMVTVSSEPKSSDKTHTCPPCPAPEAAGGPSVFLFPPKPKDTLMISRTPEVTCVVVSVSHEDPEVKFNWYVDGVEVHNAKTKPREEQYNSTYRVVSVLTVLHQDWLNGKEYKCKVSNKALPAPIEKTISKAKGQPREPQVYVLPPSREEMTKNQVSLLCLVKGFYPSDIAVEWESNGQPENNYLTWPPVLDSDGSFFLYSKLTVDKSRWQQGNVFSCSVMHEALHNHYTQKSLSLSPG

SEQ ID NO: 1265 - skipped

SEQ ID NO: 1266 - protein, 485 aa, Artificial Sequence
  source: /note="Description of Artificial Sequence: Synthetic polypeptide"
EVQLVESGGGVVQPGRSLRLSCAASGFSFSGYGMHWVRQAPGKGLEWVAVISYDGSNKYYADSVKGRFTISRDNSKNTLYLQMNSLRVEDTAVYYCARDRIWGSRGYYYGMDVWGQGTTVTVSSGGSEGKSSGSGSESKSTGGSQSALTQPASVSGSPGQSITISCTGASSDVGGYNYVSWYQQHPGKAPKLMIYEVSNRPSGVSNRFSGSKSGNTASLTISGLQAEDEADYYCSSYTITSTLVFGGGTKLTVLEPKSSDKTHTCPPCPAPEAAGGPSVFLFPPKPKDTLMISRTPEVTCVVVSVSHEDPEVKFNWYVDGVEVHNAKTKPREEQYNSTYRVVSVLTVLHQDWLNGKEYKCKVSNKALPAPIEKTISKAKGQPREPQVYVLPPSREEMTKNQVSLLCLVKGFYPSDIAVEWESNGQPENNYLTWPPVLDSDGSFFLYSKLTVDKSRWQQGNVFSCSVMHEALHNHYTQKSLSLSPG

SEQ ID NO: 1267 - skipped

SEQ ID NO: 1268 - protein, 481 aa, Artificial Sequence
  source: /note="Description of Artificial Sequence: Synthetic polypeptide"
QVQLVESGGGEVQPGRSLRLSCAASGFSFSGYGMHWVRQAPGKGLEWVAVMSYDGSNRFYVDSVRGRFSISRDNSKNTLYLQMNSLRPEDTAVYYCARDTVWGSHPDAFDIWGQGTVVTVSSGGSEGKSSGSGSESKSTGGSQSVLTQPPSVSVAPGQTARITCGGNNSGSKSVHWYQQKPGQAPVLVVYDDSDRPSGIPERFSGSNSGNTATLTISRVEAGDEADYYCQVWDSSSDHGVFGGGTKLTVLEPKSSDKTHTCPPCPAPEAAGGPSVFLFPPKPKDTLMISRTPEVTCVVVSVSHEDPEVKFNWYVDGVEVHNAKTKPREEQYNSTYRVVSVLTVLHQDWLNGKEYKCKVSNKALPAPIEKTISKAKGQPREPQVYVLPPSREEMTKNQVSLLCLVKGFYPSDIAVEWESNGQPENNYLTWPPVLDSDGSFFLYSKLTVDKSRWQQGNVFSCSVMHEALHNHYTQKSLSLSPG

SEQ ID NO: 1269 - skipped

SEQ ID NO: 1270 - protein, 481 aa, Artificial Sequence
  source: /note="Description of Artificial Sequence: Synthetic polypeptide"
QVQLQESGGDVVQPGRSLRLSCAASGFSFSGYGLHWVRQAPGRGLEWVTLISYDGSNKYYADSVKGRFTISRDNSKNTLYLQMNSLRAEDTAVYYCAKTTVSDPYYYGMDVWGQGTTVTVSSGGSEGKSSGSGSESKSTGGSSYELTQPPSVSVAPGQTARITCGGNNIGSKSVHWYQQKPGQAPVLVVYDDSDRPSGIPERFSGTNSGNTATLTISRAEAGDEADYYCQVWDSSSDHVVFGGGTKLTVLEPKSSDKTHTCPPCPAPEAAGGPSVFLFPPKPKDTLMISRTPEVTCVVVSVSHEDPEVKFNWYVDGVEVHNAKTKPREEQYNSTYRVVSVLTVLHQDWLNGKEYKCKVSNKALPAPIEKTISKAKGQPREPQVYVLPPSREEMTKNQVSLLCLVKGFYPSDIAVEWESNGQPENNYLTWPPVLDSDGSFFLYSKLTVDKSRWQQGNVFSCSVMHEALHNHYTQKSLSLSPG

SEQ ID NO: 1271 - skipped

SEQ ID NO: 1272 - protein, 479 aa, Artificial Sequence; identical to SEQ ID NO: 1264
  source: /note="Description of Artificial Sequence: Synthetic polypeptide"

SEQ ID NO: 1273 - skipped

SEQ ID NO: 1274 - protein, 478 aa, Artificial Sequence; identical to SEQ ID NO: 1262
  source: /note="Description of Artificial Sequence: Synthetic polypeptide"

SEQ ID NO: 1275 - skipped

SEQ ID NO: 1276 - protein, 481 aa, Artificial Sequence; identical to SEQ ID NO: 1260
  source: /note="Description of Artificial Sequence: Synthetic polypeptide"

SEQ ID NO: 1277 - skipped

SEQ ID NO: 1278 - protein, 487 aa, Artificial Sequence; identical to SEQ ID NO: 1258
  source: /note="Description of Artificial Sequence: Synthetic polypeptide"

SEQ ID NO: 1279 - skipped

SEQ ID NO: 1280 - protein, 486 aa, Artificial Sequence; identical to SEQ ID NO: 1256
  source: /note="Description of Artificial Sequence: Synthetic polypeptide"

SEQ ID NO: 1281 - skipped

SEQ ID NO: 1282 - protein, 481 aa, Artificial Sequence; identical to SEQ ID NO: 1254
  source: /note="Description of Artificial Sequence: Synthetic polypeptide"

SEQ ID NO: 1283 - skipped

SEQ ID NO: 1284 - protein, 481 aa, Artificial Sequence; identical to SEQ ID NO: 1252
  source: /note="Description of Artificial Sequence: Synthetic polypeptide"

SEQ ID NO: 1285 - skipped

SEQ ID NO: 1286 - protein, 481 aa, Artificial Sequence; identical to SEQ ID NO: 1270
  source: /note="Description of Artificial Sequence: Synthetic polypeptide"

SEQ ID NO: 1287 - skipped

SEQ ID NO: 1288 - protein, 481 aa, Artificial Sequence; identical to SEQ ID NO: 1268
  source: /note="Description of Artificial Sequence: Synthetic polypeptide"

SEQ ID NO: 1289 - skipped

SEQ ID NO: 1290 - protein, 485 aa, Artificial Sequence; identical to SEQ ID NO: 1266
  source: /note="Description of Artificial Sequence: Synthetic polypeptide"

SEQ ID NO: 1291 - skipped

SEQ ID NO: 1292 - protein, 487 aa, Artificial Sequence; identical to SEQ ID NO: 1250
  source: /note="Description of Artificial Sequence: Synthetic polypeptide"

SEQ ID NO: 1293 - skipped

SEQ ID NO: 1294 - protein, 478 aa, Artificial Sequence; identical to SEQ ID NO: 1248
  source: /note="Description of Artificial Sequence: Synthetic polypeptide"

SEQ ID NO: 1295 - skipped

SEQ ID NO: 1296 - protein, 449 aa, Artificial Sequence
  source: /note="Description of Artificial Sequence: Synthetic polypeptide"
QVQLQQSGPRLVRPSQTLSLTCAISGDSVFNNNAAWSWIRQSPSRGLEWLGRTYYRSKWLYDYAVSVKSRITVNPDTSRNQFTLQLNSVTPEDTALYYCARGYSSSFDYWGQGTLVTVSSASTKGPSVFPLAPSSKSTSGGTAALGCLVKDYFPEPVTVSWNSGALTSGVHTFPAVLQSSGLYSLSSVVTVPSSSLGTQTYICNVNHKPSNTKVDKKVEPKSCDKTHTCPPCPAPEAAGGPSVFLFPPKPKDTLMISRTPEVTCVVVSVSHEDPEVKFNWYVDGVEVHNAKTKPREEQYNSTYRVVSVLTVLHQDWLNGKEYKCKVSNKALPAPIEKTISKAKGQPREPQVYTLPPSREEMTKNQVSLTCLVKGFYPSDIAVEWESNGQPENNYKTTPPVLDSDGSFLLYSKLTVDKSRWQQGNVFSCSVMHEALHNHYTQKSLSLSPG

SEQ ID NO: 1297 - protein, 216 aa, Artificial Sequence; identical to SEQ ID NO: 1189
  source: /note="Description of Artificial Sequence: Synthetic polypeptide"

SEQ ID NO: 1298 - protein, 449 aa, Artificial Sequence; identical to SEQ ID NO: 1296
  source: /note="Description of Artificial Sequence: Synthetic polypeptide"

SEQ ID NO: 1299 - protein, 216 aa, Artificial Sequence; identical to SEQ ID NO: 1189
  source: /note="Description of Artificial Sequence: Synthetic polypeptide"

SEQ ID NO: 1300 - protein, 449 aa, Artificial Sequence; identical to SEQ ID NO: 1296
  source: /note="Description of Artificial Sequence: Synthetic polypeptide"

SEQ ID NO: 1301 - protein, 216 aa, Artificial Sequence; identical to SEQ ID NO: 1189
  source: /note="Description of Artificial Sequence: Synthetic polypeptide"

SEQ ID NO: 1302 - protein, 449 aa, Artificial Sequence; identical to SEQ ID NO: 1296
  source: /note="Description of Artificial Sequence: Synthetic polypeptide"

SEQ ID NO: 1303 - protein, 216 aa, Artificial Sequence; identical to SEQ ID NO: 1189
  source: /note="Description of Artificial Sequence: Synthetic polypeptide"

SEQ ID NO: 1304 - protein, 449 aa, Artificial Sequence; identical to SEQ ID NO: 1296
  source: /note="Description of Artificial Sequence: Synthetic polypeptide"

SEQ ID NO: 1305 - protein, 216 aa, Artificial Sequence; identical to SEQ ID NO: 1189
  source: /note="Description of Artificial Sequence: Synthetic polypeptide"

SEQ ID NO: 1306 - protein, 449 aa, Artificial Sequence; identical to SEQ ID NO: 1296
  source: /note="Description of Artificial Sequence: Synthetic polypeptide"

SEQ ID NO: 1307 - protein, 216 aa, Artificial Sequence; identical to SEQ ID NO: 1189
  source: /note="Description of Artificial Sequence: Synthetic polypeptide"

SEQ ID NO: 1308 - protein, 449 aa, Artificial Sequence; identical to SEQ ID NO: 1296
  source: /note="Description of Artificial Sequence: Synthetic polypeptide"

SEQ ID NO: 1309 - protein, 216 aa, Artificial Sequence; identical to SEQ ID NO: 1189
  source: /note="Description of Artificial Sequence: Synthetic polypeptide"

SEQ ID NO: 1310 - protein, 449 aa, Artificial Sequence; identical to SEQ ID NO: 1296
  source: /note="Description of Artificial Sequence: Synthetic polypeptide"

SEQ ID NO: 1311 - protein, 216 aa, Artificial Sequence; identical to SEQ ID NO: 1189
  source: /note="Description of Artificial Sequence: Synthetic polypeptide"

SEQ ID NO: 1312 - protein, 449 aa, Artificial Sequence; identical to SEQ ID NO: 1296
  source: /note="Description of Artificial Sequence: Synthetic polypeptide"

SEQ ID NO: 1313 - protein, 216 aa, Artificial Sequence; identical to SEQ ID NO: 1189
  source: /note="Description of Artificial Sequence: Synthetic polypeptide"

SEQ ID NO: 1314 - protein, 449 aa, Artificial Sequence; identical to SEQ ID NO: 1296
  source: /note="Description of Artificial Sequence: Synthetic polypeptide"

SEQ ID NO: 1315 - protein, 216 aa, Artificial Sequence; identical to SEQ ID NO: 1189
  source: /note="Description of Artificial Sequence: Synthetic polypeptide"

SEQ ID NO: 1316 - protein, 449 aa, Artificial Sequence; identical to SEQ ID NO: 1296
  source: /note="Description of Artificial Sequence: Synthetic polypeptide"

SEQ ID NO: 1317 - protein, 216 aa, Artificial Sequence; identical to SEQ ID NO: 1189
  source: /note="Description of Artificial Sequence: Synthetic polypeptide"

SEQ ID NO: 1318 - protein, 444 aa, Artificial Sequence
  source: /note="Description of Artificial Sequence: Synthetic polypeptide"
EVQLVESGGGLVKPGGSLRLSCAASGFTFSRYNMNWVRQAPGKGLEWVSSISTSSNYIYYADSVKGRFTFSRDNAKNSLDLQMSGLRAEDTAIYYCTRGWGPFDYWGQGTLVTVSSASTKGPSVFPLAPSSKSTSGGTAALGCLVKDYFPEPVTVSWNSGALTSGVHTFPAVLQSSGLYSLSSVVTVPSSSLGTQTYICNVNHKPSNTKVDKKVEPKSCDKTHTCPPCPAPEAAGGPSVFLFPPKPKDTLMISRTPEVTCVVVSVSHEDPEVKFNWYVDGVEVHNAKTKPREEQYNSTYRVVSVLTVLHQDWLNGKEYKCKVSNKALPAPIEKTISKAKGQPREPQVYTLPPSREEMTKNQVSLTCLVKGFYPSDIAVEWESNGQPENNYKTTPPVLDSDGSFLLYSKLTVDKSRWQQGNVFSCSVMHEALHNHYTQKSLSLSP

SEQ ID NO: 1319 - protein, 214 aa, Artificial Sequence
  source: /note="Description of Artificial Sequence: Synthetic polypeptide"
DIQMTQSPSSLSASVGDRVTITCRARQSIGTAIHWYQQKPGKAPKLLIKYASESISGVPSRFSGSGSGTDFTLTISSLQPEDFATYYCQQSGSWPYTFGQGTKLEIKRTVAAPSVFIFPPSDEQLKSGTASVVCLLNNFYPREAKVQWKVDNALQSGNSQESVTEQDSKDSTYSLSSTLTLSKADYEKHKVYACEVTHQGLSSPVTKSFNRGEC

SEQ ID NO: 1320 - protein, 444 aa, Artificial Sequence; identical to SEQ ID NO: 1318
  source: /note="Description of Artificial Sequence: Synthetic polypeptide"

SEQ ID NO: 1321 - protein, 214 aa, Artificial Sequence; identical to SEQ ID NO: 1319
  source: /note="Description of Artificial Sequence: Synthetic polypeptide"

SEQ ID NO: 1322 - protein, 444 aa, Artificial Sequence; identical to SEQ ID NO: 1318
  source: /note="Description of Artificial Sequence: Synthetic polypeptide"

SEQ ID NO: 1323 - protein, 214 aa, Artificial Sequence; identical to SEQ ID NO: 1319
  source: /note="Description of Artificial Sequence: Synthetic polypeptide"

SEQ ID NO: 1324 - protein, 444 aa, Artificial Sequence; identical to SEQ ID NO: 1318
  source: /note="Description of Artificial Sequence: Synthetic polypeptide"

SEQ ID NO: 1325 - protein, 214 aa, Artificial Sequence; identical to SEQ ID NO: 1319
  source: /note="Description of Artificial Sequence: Synthetic polypeptide"

SEQ ID NO: 1326 - protein, 444 aa, Artificial Sequence; identical to SEQ ID NO: 1318
  source: /note="Description of Artificial Sequence: Synthetic polypeptide"

SEQ ID NO: 1327 - protein, 214 aa, Artificial Sequence; identical to SEQ ID NO: 1319
  source: /note="Description of Artificial Sequence: Synthetic polypeptide"

SEQ ID NO: 1328 - protein, 444 aa, Artificial Sequence; identical to SEQ ID NO: 1318
  source: /note="Description of Artificial Sequence: Synthetic polypeptide"

SEQ ID NO: 1329 - protein, 214 aa, Artificial Sequence; identical to SEQ ID NO: 1319
  source: /note="Description of Artificial Sequence: Synthetic polypeptide"

SEQ ID NO: 1330 - protein, 444 aa, Artificial Sequence; identical to SEQ ID NO: 1318
  source: /note="Description of Artificial Sequence: Synthetic polypeptide"

SEQ ID NO: 1331 - protein, 214 aa, Artificial Sequence; identical to SEQ ID NO: 1319
  source: /note="Description of Artificial Sequence: Synthetic polypeptide"

SEQ ID NO: 1332 - protein, 444 aa, Artificial Sequence; identical to SEQ ID NO: 1318
  source: /note="Description of Artificial Sequence: Synthetic polypeptide"

SEQ ID NO: 1333 - protein, 214 aa, Artificial Sequence; identical to SEQ ID NO: 1319
  source: /note="Description of Artificial Sequence: Synthetic polypeptide"

SEQ ID NO: 1334 - protein, 444 aa, Artificial Sequence; identical to SEQ ID NO: 1318
  source: /note="Description of Artificial Sequence: Synthetic polypeptide"

SEQ ID NO: 1335 - protein, 214 aa, Artificial Sequence; identical to SEQ ID NO: 1319
  source: /note="Description of Artificial Sequence: Synthetic polypeptide"

SEQ ID NO: 1336 - protein, 444 aa, Artificial Sequence; identical to SEQ ID NO: 1318
  source: /note="Description of Artificial Sequence: Synthetic polypeptide"

SEQ ID NO: 1337 - protein, 214 aa, Artificial Sequence; identical to SEQ ID NO: 1319
  source: /note="Description of Artificial Sequence: Synthetic polypeptide"

SEQ ID NO: 1338 - protein, 444 aa, Artificial Sequence; identical to SEQ ID NO: 1318
  source: /note="Description of Artificial Sequence: Synthetic polypeptide"

SEQ ID NO: 1339 - protein, 214 aa, Artificial Sequence; identical to SEQ ID NO: 1319
  source: /note="Description of Artificial Sequence: Synthetic polypeptide"

SEQ ID NO: 1340 - protein, 450 aa, Artificial Sequence; identical to SEQ ID NO: 1188
  source: /note="Description of Artificial Sequence: Synthetic polypeptide"

SEQ ID NO: 1341 - protein, 216 aa, Artificial Sequence; identical to SEQ ID NO: 1189
  source: /note="Description of Artificial Sequence: Synthetic polypeptide"

SEQ ID NO: 1342 - protein, 450 aa, Artificial Sequence; identical to SEQ ID NO: 1188
  source: /note="Description of Artificial Sequence: Synthetic polypeptide"

SEQ ID NO: 1343 - protein, 216 aa, Artificial Sequence; identical to SEQ ID NO: 1189
  source: /note="Description of Artificial Sequence: Synthetic polypeptide"

SEQ ID NO: 1344 - protein, 450 aa, Artificial Sequence; identical to SEQ ID NO: 1188
  source: /note="Description of Artificial Sequence: Synthetic polypeptide"

SEQ ID NO: 1345 - protein, 216 aa, Artificial Sequence; identical to SEQ ID NO: 1189
  source: /note="Description of Artificial Sequence: Synthetic polypeptide"

SEQ ID NO: 1346 - protein, 450 aa, Artificial Sequence; identical to SEQ ID NO: 1188
  source: /note="Description of Artificial Sequence: Synthetic polypeptide"

SEQ ID NO: 1347 - protein, 216 aa, Artificial Sequence; identical to SEQ ID NO: 1189
  source: /note="Description of Artificial Sequence: Synthetic polypeptide"

SEQ ID NO: 1348 - protein, 450 aa, Artificial Sequence
  source: /note="Description of Artificial Sequence: Synthetic polypeptide"
QVQLQQSGPGLVKPSQTLSLTCAISGDSVFNNNAAWSWIRQSPSRGLEWLGRTYYRSKWLYDYAVSVKSRITINPDTSKNQFSLQLNSVTPEDTAVYYCARGYSSSFDYWGQGTLVTVSSASTKGPSVFPLAPSSKSTSGGTAALGCLVKDYFPEPVTVSWNSGALTSGVHTFPAVLQSSGLYSLSSVVTVPSSSLGTQTYICNVNHKPSNTKVDKKVEPKSCDKTHTCPPCPAPEAAGGPSVFLFPPKPKDTLMISRTPEVTCVVVSVSHEDPEVKFNWYVDGVEVHNAKTKPREEQYNSTYRVVSVLTVLHQDWLNGKEYKCKVSNKALPAPIEKTISKAKGQPREPQVYTLPPSREEMTKNQVSLTCLVKGFYPSDIAVEWESNGQPENNYKTTPPVLDSDGSFLLYSKLTVDKSRWQQGNVFSCSVMHEALHNHYTQKSLSLSPGK

SEQ ID NO: 1349 - protein, 216 aa, Artificial Sequence
  source: /note="Description of Artificial Sequence: Synthetic polypeptide"
QSALTQPASVSGSPGQSITISCTGTSSNIGTYKFVSWYQQHPGKAPKVMIYEVSKRPSGVSNRFSGSKSGNTASLTISGLQAEDEADYYCVSYAGSGTLLFGGGTKLTVLGQPKAAPSVTLFPPSSEELQANKATLVCLISDFYPGAVTVAWKADSSPVKAGVETTTPSKQSNNKYAASSYLSLTPEQWKSHRSYSCQVTHEGSTVEKTVAPTECS

SEQ ID NO: 1350 - protein, 450 aa, Artificial Sequence; identical to SEQ ID NO: 1348
  source: /note="Description of Artificial Sequence: Synthetic polypeptide"

SEQ ID NO: 1351 - protein, 216 aa, Artificial Sequence; identical to SEQ ID NO: 1349
  source: /note="Description of Artificial Sequence: Synthetic polypeptide"

SEQ ID NO: 1352 - protein, 450 aa, Artificial Sequence; identical to SEQ ID NO: 1348
  source: /note="Description of Artificial Sequence: Synthetic polypeptide"

SEQ ID NO: 1353 - protein, 216 aa, Artificial Sequence; identical to SEQ ID NO: 1349
  source: /note="Description of Artificial Sequence: Synthetic polypeptide"

SEQ ID NO: 1354 - protein, 449 aa, Artificial Sequence
  source: /note="Description of Artificial Sequence: Synthetic polypeptide"
QVQLQQSGPGLVKPSQTLSLTCAISGDSVFNNNAAWSWIRQSPSRGLEWLGRTYYRSKWLYDYAVSVKSRITINPDTSKNQFSLQLNSVTPEDTAVYYCARGYSSSFDYWGQGTLVTVSSASTKGPSVFPLAPSSKSTSGGTAALGCLVKDYFPEPVTVSWNSGALTSGVHTFPAVLQSSGLYSLSSVVTVPSSSLGTQTYICNVNHKPSNTKVDKKVEPKSCDKTHTCPPCPAPEAAGGPSVFLFPPKPKDTLMISRTPEVTCVVVSVSHEDPEVKFNWYVDGVEVHNAKTKPREEQYNSTYRVVSVLTVLHQDWLNGKEYKCKVSNKALPAPIEKTISKAKGQPREPQVYTLPPSREEMTKNQVSLTCLVKGFYPSDIAVEWESNGQPENNYKTTPPVLDSDGSFLLYSKLTVDKSRWQQGNVFSCSVMHEALHNHYTQKSLSLSPG

SEQ ID NO: 1355 - protein, 216 aa, Artificial Sequence; identical to SEQ ID NO: 1349
  source: /note="Description of Artificial Sequence: Synthetic polypeptide"

SEQ ID NO: 1356 - protein, 451 aa, Artificial Sequence
  source: /note="Description of Artificial Sequence: Synthetic polypeptide"
EVQLVESGGGLVKPGGSLRLSCAASGFTFSRYNMNWVRQAPGKGLEWVSSINSNSRYIYYADSVKGRFTISRDSAKNSLYLQMNSLRAEDTAVYYCAKTMGDYYYYYGMDVWGQGTTVTVSSASTKGPSVFPLAPSSKSTSGGTAALGCLVKDYFPEPVTVSWNSGALTSGVHTFPAVLQSSGLYSLSSVVTVPSSSLGTQTYICNVNHKPSNTKVDKKVEPKSCDKTHTCPPCPAPEAAGGPSVFLFPPKPKDTLMISRTPEVTCVVVSVSHEDPEVKFNWYVDGVEVHNAKTKPREEQYNSTYRVVSVLTVLHQDWLNGKEYKCKVSNKALPAPIEKTISKAKGQPREPQVYTLPPSREEMTKNQVSLTCLVKGFYPSDIAVEWESNGQPENNYKTTPPVLDSDGSFFLYSRLTVDKSRWQQGNVFSCSVMHEALHNHYTQKSLSLSPG

SEQ ID NO: 1357 - protein, 217 aa, Artificial Sequence
  source: /note="Description of Artificial Sequence: Synthetic polypeptide"
QSVLTQPPSVSGAPGQRVTISCTGSSFNLGAGYDVHWYQQVPGTVPKLLIYDNSNRPSGVPDRFSGSKSGTSASLAITGLQAEDETVYYCQSYDSSLSGVVFGGGTKLTVLGQPKAAPSVTLFPPSSEELQANKATLVCLISDFYPGAVTVAWKADSSPVKAGVETTTPSKQSNNKYAASSYLSLTPEQWKSHRSYSCQVTHEGSTVEKTVAPTECS

SEQ ID NO: 1358 - protein, 451 aa, Artificial Sequence; identical to SEQ ID NO: 1356
  source: /note="Description of Artificial Sequence: Synthetic polypeptide"

SEQ ID NO: 1359 - protein, 217 aa, Artificial Sequence
  source: /note="Description of Artificial Sequence: Synthetic polypeptide"
SSELTQPPSVSGAPGQRVTISCAGSLSNIGAGYDVHWYQQLPGTAPKLLIYGNINRLSGVPERFSGSKSGTSASLAITGLQAEDGADYYCQSYDSSLSSYVFGTGTKVTVLGQPKAAPSVTLFPPSSEELQANKATLVCLISDFYPGAVTVAWKADSSPVKAGVETTTPSKQSNNKYAASSYLSLTPEQWKSHRSYSCQVTHEGSTVEKTVAPTECS

SEQ ID NO: 1360 - protein, 454 aa, Artificial Sequence
  source: /note="Description of Artificial Sequence: Synthetic polypeptide"
EVQLVESGGGVVQPGRSLRLSCAASGFTFITYGMHWVRQAPGKGLEWVAVVSFDESNKYYADSVKGRFTISRDNSKNTLYLQMNSLRAEDTAVYYCARALRDGNNWDYFNGMDVWGQGTTVTVSSASTKGPSVFPLAPSSKSTSGGTAALGCLVKDYFPEPVTVSWNSGALTSGVHTFPAVLQSSGLYSLSSVVTVPSSSLGTQTYICNVNHKPSNTKVDKKVEPKSCDKTHTCPPCPAPEAAGGPSVFLFPPKPKDTLMISRTPEVTCVVVSVSHEDPEVKFNWYVDGVEVHNAKTKPREEQYNSTYRVVSVLTVLHQDWLNGKEYKCKVSNKALPAPIEKTISKAKGQPREPQVYTLPPSREEMTKNQVSLTCLVKGFYPSDIAVEWESNGQPENNYKTTPPVLDSDGSFFLYSRLTVDKSRWQQGNVFSCSVMHEALHNHYTQKSLSLSPG

SEQ ID NO: 1361 - protein, 216 aa, Artificial Sequence
  source: /note="Description of Artificial Sequence: Synthetic polypeptide"
QSVLTQPPSASGTPGQGVTISCSGSSSNIGSNTVNWFQQLPGTAPKLLIYSDNQRPSGVPDRFSGSKSGTSASLAISGLQSEDEADYYCAAWDDSLNGYVFGTGTKVTVLGQPKAAPSVTLFPPSSEELQANKATLVCLISDFYPGAVTVAWKADSSPVKAGVETTTPSKQSNNKYAASSYLSLTPEQWKSHRSYSCQVTHEGSTVEKTVAPTECS

SEQ ID NO: 1362 - protein, 454 aa, Artificial Sequence; identical to SEQ ID NO: 1360
  source: /note="Description of Artificial Sequence: Synthetic polypeptide"

SEQ ID NO: 1363 - protein, 217 aa, Artificial Sequence
  source: /note="Description of Artificial Sequence: Synthetic polypeptide"
QSVLTQPPSVSGAPGQRVTISCTGSSSNIGADYDVHWYQHLPGTAPKLLIYGNSNRPSGVPDRFSGSKSGTSASLAITGLQAEDETDYYCQSYDSSLSGWVFGGGTKLTVLGQPKAAPSVTLFPPSSEELQANKATLVCLISDFYPGAVTVAWKADSSPVKAGVETTTPSKQSNNKYAASSYLSLTPEQWKSHRSYSCQVTHEGSTVEKTVAPTECS

SEQ ID NO: 1364 - protein, 453 aa, Artificial Sequence
  source: /note="Description of Artificial Sequence: Synthetic polypeptide"
QVQLVESGGGVVQPGRSLRLSCVASGFTFSSYGIHWVRQAPGKGLEWVAVIWYDGSNKYYADSVKGRFTISRDNSKNTLYLQMNSLRAEDTAVYYSVRGVGPTSYYYNYGMDVWGQGTTVTVSSASTKGPSVFPLAPSSKSTSGGTAALGCLVKDYFPEPVTVSWNSGALTSGVHTFPAVLQSSGLYSLSSVVTVPSSSLGTQTYICNVNHKPSNTKVDKKVEPKSCDKTHTCPPCPAPEAAGGPSVFLFPPKPKDTLMISRTPEVTCVVVSVSHEDPEVKFNWYVDGVEVHNAKTKPREEQYNSTYRVVSVLTVLHQDWLNGKEYKCKVSNKALPAPIEKTISKAKGQPREPQVYTLPPSREEMTKNQVSLTCLVKGFYPSDIAVEWESNGQPENNYKTTPPVLDSDGSFFLYSRLTVDKSRWQQGNVFSCSVMHEALHNHYTQKSLSLSPG

SEQ ID NO: 1365 - protein, 216 aa, Artificial Sequence; identical to SEQ ID NO: 1361
  source: /note="Description of Artificial Sequence: Synthetic polypeptide"

SEQ ID NO: 1366 - protein, 453 aa, Artificial Sequence; identical to SEQ ID NO: 1364
  source: /note="Description of Artificial Sequence: Synthetic polypeptide"

SEQ ID NO: 1367 - protein, 217 aa, Artificial Sequence; identical to SEQ ID NO: 1363
  source: /note="Description of Artificial Sequence: Synthetic polypeptide"

SEQ ID NO: 1368 - protein, 450 aa, Artificial Sequence
  source: /note="Description of Artificial Sequence: Synthetic polypeptide"
EVQLVESGGGLVQPGGSLRLSCAASGFTFSSYAMSWVRQAPGKGLEWVSAISGGIGSTYYADSVKGRFTISRDNSKNTLWLQMNSLRAEDTAVYYCAKDGVGATPYYFDYWGQGTLVTVSSASTKGPSVFPLAPSSKSTSGGTAALGCLVKDYFPEPVTVSWNSGALTSGVHTFPAVLQSSGLYSLSSVVTVPSSSLGTQTYICNVNHKPSNTKVDKKVEPKSCDKTHTCPPCPAPEAAGGPSVFLFPPKPKDTLMISRTPEVTCVVVSVSHEDPEVKFNWYVDGVEVHNAKTKPREEQYNSTYRVVSVLTVLHQDWLNGKEYKCKVSNKALPAPIEKTISKAKGQPREPQVYTLPPSREEMTKNQVSLTCLVKGFYPSDIAVEWESNGQPENNYKTTPPVLDSDGSFFLYSRLTVDKSRWQQGNVFSCSVMHEALHNHYTQKSLSLSPG

SEQ ID NO: 1369 - protein, 216 aa, Artificial Sequence
  source: /note="Description of Artificial Sequence: Synthetic polypeptide"
QSVLTQPPSVSAAPGQKVTISCSGSSSNIGNNYVSWYQQLPGTAPKLLIYDNNKRPSGIPDRFSGSKSGTSATLGITGLQTGDEADYYCGTWDSSLSAYVFGTGTKVTVLGQPKAAPSVTLFPPSSEELQANKATLVCLISDFYPGAVTVAWKADSSPVKAGVETTTPSKQSNNKYAASSYLSLTPEQWKSHRSYSCQVTHEGSTVEKTVAPTECS

SEQ ID NO: 1370 - protein, 450 aa, Artificial Sequence; identical to SEQ ID NO: 1368
  source: /note="Description of Artificial Sequence: Synthetic polypeptide"

SEQ ID NO: 1371 - protein, 216 aa, Artificial Sequence; identical to SEQ ID NO: 1243
  source: /note="Description of Artificial Sequence: Synthetic polypeptide"

SEQ ID NO: 1372 - protein, 450 aa, Artificial Sequence
  source: /note="Description of Artificial Sequence: Synthetic polypeptide"
EVQLVESGGGLVQPGGSLRLSCAASGFTFSSYAMSWVRQAPGKGLEWVSAISGGSGSTYYADSVKGRFTISRDNSKNTLYLQMNSLRAEDSAVYYCAKDGVGATPYYFDYWGQGTLVTVSSASTKGPSVFPLAPSSKSTSGGTAALGCLVKDYFPEPVTVSWNSGALTSGVHTFPAVLQSSGLYSLSSVVTVPSSSLGTQTYICNVNHKPSNTKVDKKVEPKSCDKTHTCPPCPAPEAAGGPSVFLFPPKPKDTLMISRTPEVTCVVVSVSHEDPEVKFNWYVDGVEVHNAKTKPREEQYNSTYRVVSVLTVLHQDWLNGKEYKCKVSNKALPAPIEKTISKAKGQPREPQVYTLPPSREEMTKNQVSLTCLVKGFYPSDIAVEWESNGQPENNYKTTPPVLDSDGSFFLYSRLTVDKSRWQQGNVFSCSVMHEALHNHYTQKSLSLSPG

SEQ ID NO: 1373 - protein, 216 aa, Artificial Sequence; identical to SEQ ID NO: 1369
  source: /note="Description of Artificial Sequence: Synthetic polypeptide"

SEQ ID NO: 1374 - protein, 450 aa, Artificial Sequence; identical to SEQ ID NO: 1372
  source: /note="Description of Artificial Sequence: Synthetic polypeptide"

SEQ ID NO: 1375 - protein, 216 aa, Artificial Sequence; identical to SEQ ID NO: 1243
  source: /note="Description of Artificial Sequence: Synthetic polypeptide"

SEQ ID NO: 1376 - protein, 450 aa, Artificial Sequence
  source: /note="Description of Artificial Sequence: Synthetic polypeptide"
EVQLVESGGGLVQPGGSLRLSCTASGFIFSSYAMSWVRQAPGKGLEWVSAISGGYGAPYYADTVKGRFTISRDNSKNTLYLQMNSLRAEDTAVYYCAKDGVGATPYYFDDWGQGILVTVSSASTKGPSVFPLAPSSKSTSGGTAALGCLVKDYFPEPVTVSWNSGALTSGVHTFPAVLQSSGLYSLSSVVTVPSSSLGTQTYICNVNHKPSNTKVDKKVEPKSCDKTHTCPPCPAPEAAGGPSVFLFPPKPKDTLMISRTPEVTCVVVSVSHEDPEVKFNWYVDGVEVHNAKTKPREEQYNSTYRVVSVLTVLHQDWLNGKEYKCKVSNKALPAPIEKTISKAKGQPREPQVYTLPPSREEMTKNQVSLTCLVKGFYPSDIAVEWESNGQPENNYKTTPPVLDSDGSFFLYSRLTVDKSRWQQGNVFSCSVMHEALHNHYTQKSLSLSPG

SEQ ID NO: 1377 - protein, 216 aa, Artificial Sequence
  source: /note="Description of Artificial Sequence: Synthetic polypeptide"
QSVLTQPPSVSAAPGQKVTISCSGSSSNIGNNYVSWYQQLPGTAPKLLIFDNNKRPSGIPDRFSGSKSGTSATLGITGLQTGDEADYYCGTWDSSLSAYVFGTGTKVTVLGQPKAAPSVTLFPPSSEELQANKATLVCLISDFYPGAVTVAWKADSSPVKAGVETTTPSKQSNNKYAASSYLSLTPEQWKSHRSYSCQVTHEGSTVEKTVAPTECS

SEQ ID NO: 1378 - protein, 451 aa, Artificial Sequence; identical to SEQ ID NO: 1356
  source: /note="Description of Artificial Sequence: Synthetic polypeptide"

SEQ ID NO: 1379 - protein, 217 aa, Artificial Sequence; identical to SEQ ID NO: 1357
  source: /note="Description of Artificial Sequence: Synthetic polypeptide"

SEQ ID NO: 1380 - protein, 451 aa, Artificial Sequence; identical to SEQ ID NO: 1356
  source: /note="Description of Artificial Sequence: Synthetic polypeptide"

SEQ ID NO: 1381 - protein, 217 aa, Artificial Sequence; identical to SEQ ID NO: 1359
  source: /note="Description of Artificial Sequence: Synthetic polypeptide"

SEQ ID NO: 1382 - protein, 454 aa, Artificial Sequence; identical to SEQ ID NO: 1360
  source: /note="Description of Artificial Sequence: Synthetic polypeptide"

SEQ ID NO: 1383 - protein, 216 aa, Artificial Sequence; identical to SEQ ID NO: 1361
  source: /note="Description of Artificial Sequence: Synthetic polypeptide"

SEQ ID NO: 1384 - protein, 454 aa, Artificial Sequence; identical to SEQ ID NO: 1360
  source: /note="Description of Artificial Sequence: Synthetic polypeptide"

SEQ ID NO: 1385 - protein, 217 aa, Artificial Sequence; identical to SEQ ID NO: 1363
  source: /note="Description of Artificial Sequence: Synthetic polypeptide"

SEQ ID NO: 1386 - protein, 453 aa, Artificial Sequence; identical to SEQ ID NO: 1364
  source: /note="Description of Artificial Sequence: Synthetic polypeptide"

SEQ ID NO: 1387 - protein, 216 aa, Artificial Sequence; identical to SEQ ID NO: 1361
  source: /note="Description of Artificial Sequence: Synthetic polypeptide"

SEQ ID NO: 1388 - protein, 453 aa, Artificial Sequence; identical to SEQ ID NO: 1364
  source: /note="Description of Artificial Sequence: Synthetic polypeptide"

SEQ ID NO: 1389 - protein, 217 aa, Artificial Sequence; identical to SEQ ID NO: 1363
  source: /note="Description of Artificial Sequence: Synthetic polypeptide"

SEQ ID NO: 1390 - protein, 450 aa, Artificial Sequence; identical to SEQ ID NO: 1368
  source: /note="Description of Artificial Sequence: Synthetic polypeptide"

SEQ ID NO: 1391 - protein, 216 aa, Artificial Sequence; identical to SEQ ID NO: 1369
  source: /note="Description of Artificial Sequence: Synthetic polypeptide"

SEQ ID NO: 1392 - protein, 450 aa, Artificial Sequence; identical to SEQ ID NO: 1368
  source: /note="Description of Artificial Sequence: Synthetic polypeptide"

SEQ ID NO: 1393 - protein, 216 aa, Artificial Sequence; identical to SEQ ID NO: 1243
  source: /note="Description of Artificial Sequence: Synthetic polypeptide"

SEQ ID NO: 1394 - protein, 450 aa, Artificial Sequence; identical to SEQ ID NO: 1372
  source: /note="Description of Artificial Sequence: Synthetic polypeptide"

SEQ ID NO: 1395 - protein, 216 aa, Artificial Sequence; identical to SEQ ID NO: 1369
  source: /note="Description of Artificial Sequence: Synthetic polypeptide"

SEQ ID NO: 1396 - protein, 450 aa, Artificial Sequence; identical to SEQ ID NO: 1372
  source: /note="Description of Artificial Sequence: Synthetic polypeptide"

SEQ ID NO: 1397 - protein, 216 aa, Artificial Sequence; identical to SEQ ID NO: 1243
  source: /note="Description of Artificial Sequence: Synthetic polypeptide"

SEQ ID NO: 1398 - protein, 450 aa, Artificial Sequence; identical to SEQ ID NO: 1376
  source: /note="Description of Artificial Sequence: Synthetic polypeptide"

SEQ ID NO: 1399 - protein, 216 aa, Artificial Sequence; identical to SEQ ID NO: 1377
  source: /note="Description of Artificial Sequence: Synthetic polypeptide"

SEQ ID NO: 1400 - protein, 451 aa, Artificial Sequence; identical to SEQ ID NO: 1242
  source: /note="Description of Artificial Sequence: Synthetic polypeptide"

SEQ ID NO: 1401 - protein, 216 aa, Artificial Sequence; identical to SEQ ID NO: 1369
  source: /note="Description of Artificial Sequence: Synthetic polypeptide"

SEQ ID NO: 1402 - protein, 451 aa, Artificial Sequence; identical to SEQ ID NO: 1242
  source: /note="Description of Artificial Sequence: Synthetic polypeptide"

SEQ ID NO: 1403 - protein, 216 aa, Artificial Sequence; identical to SEQ ID NO: 1243
  source: /note="Description of Artificial Sequence: Synthetic polypeptide"

SEQ ID NO: 1404 - protein, 451 aa, Artificial Sequence
  source: /note="Description of Artificial Sequence: Synthetic polypeptide"
EVQLVESGGGLVQPGGSLRLSCAASGFTFSSYAMSWVRQAPGKGLEWVSAISGGSGSTYYADSVKGRFTISRDNSKNTLYLQMNSLRAEDSAVYYCAKDGVGATPYYFDYWGQGTLVTVSSASTKGPSVFPLAPSSKSTSGGTAALGCLVKDYFPEPVTVSWNSGALTSGVHTFPAVLQSSGLYSLSSVVTVPSSSLGTQTYICNVNHKPSNTKVDKKVEPKSCDKTHTCPPCPAPEAAGGPSVFLFPPKPKDTLMISRTPEVTCVVVSVSHEDPEVKFNWYVDGVEVHNAKTKPREEQYNSTYRVVSVLTVLHQDWLNGKEYKCKVSNKALPAPIEKTISKAKGQPREPQVYTLPPSREEMTKNQVSLTCLVKGFYPSDIAVEWESNGQPENNYKTTPPVLDSDGSFFLYSRLTVDKSRWQQGNVFSCSVMHEALHNHYTQKSLSLSPGK

SEQ ID NO: 1405 - protein, 216 aa, Artificial Sequence; identical to SEQ ID NO: 1369
  source: /note="Description of Artificial Sequence: Synthetic polypeptide"

SEQ ID NO: 1406 - protein, 451 aa, Artificial Sequence; identical to SEQ ID NO: 1404
  source: /note="Description of Artificial Sequence: Synthetic polypeptide"

SEQ ID NO: 1407 - protein, 216 aa, Artificial Sequence; identical to SEQ ID NO: 1243
  source: /note="Description of Artificial Sequence: Synthetic polypeptide"

SEQ ID NO: 1408 - protein, 451 aa, Artificial Sequence; identical to SEQ ID NO: 1242
  source: /note="Description of Artificial Sequence: Synthetic polypeptide"

SEQ ID NO: 1409 - protein, 216 aa, Artificial Sequence; identical to SEQ ID NO: 1369
  source: /note="Description of Artificial Sequence: Synthetic polypeptide"

SEQ ID NO: 1410 - protein, 451 aa, Artificial Sequence; identical to SEQ ID NO: 1242
  source: /note="Description of Artificial Sequence: Synthetic polypeptide"

SEQ ID NO: 1411 - protein, 216 aa, Artificial Sequence; identical to SEQ ID NO: 1243
  source: /note="Description of Artificial Sequence: Synthetic polypeptide"

SEQ ID NO: 1412 - protein, 451 aa, Artificial Sequence; identical to SEQ ID NO: 1404
  source: /note="Description of Artificial Sequence: Synthetic polypeptide"

SEQ ID NO: 1413 - protein, 216 aa, Artificial Sequence; identical to SEQ ID NO: 1243
  source: /note="Description of Artificial Sequence: Synthetic polypeptide"

SEQ ID NO: 1414 - protein, 450 aa, Artificial Sequence; identical to SEQ ID NO: 1372
  source: /note="Description of Artificial Sequence: Synthetic polypeptide"

SEQ ID NO: 1415 - protein, 216 aa, Artificial Sequence; identical to SEQ ID NO: 1369
  source: /note="Description of Artificial Sequence: Synthetic polypeptide"

SEQ ID NO: 1416-1454 - skipped (39 entries)

SEQ ID NO: 1455 - protein, 479 aa, Artificial Sequence
  source: /note="Description of Artificial Sequence: Synthetic polypeptide"
EIVLTQSPATLSASPGERVTLSCSASSSVSYMNWYQQKPGQAPRRWIYDSSKLASGVPARFSGSGSGRDYTLTISSLEPEDFAVYYCQQWSRNPPTFGGGTKVEIKGGSEGKSSGSGSESKSTGGSQVQLVQSGAEVKKPGSSVKVSCKASGYTFTRSTMHWVKQAPGQGLEWIGYINPSSAYTNYNQKFQGRVTLTADKSTSTAYMELSSLRSEDTAVYYCASPQVHYDYAGFPYWGQGTLVTVSSEPKSSDKTHTCPPCPAPEAAGGPSVFLFPPKPKDTLMISRTPEVTCVVVSVSHEDPEVKFNWYVDGVEVHNAKTKPREEQYNSTYRVVSVLTVLHQDWLNGKEYKCKVSNKALPAPIEKTISKAKGQPREPQVYTLPPSREEMTKNQVSLWCLVKGFYPSDIAVEWESNGQPENNYKTTPPVLDSDGSFFLYSKLTVDKSRWQQGNVFSCSVMHEALHNHYTQKSLSLSPGK

SEQ ID NO: 1456 - skipped

SEQ ID NO: 1457 - protein, 479 aa, Artificial Sequence; identical to SEQ ID NO: 1455
  source: /note="Description of Artificial Sequence: Synthetic polypeptide"

SEQ ID NO: 1458 - skipped

SEQ ID NO: 1459 - protein, 450 aa, Artificial Sequence
  source: /note="Description of Artificial Sequence: Synthetic polypeptide"
EVQLVESGGGLVKPGGSLRLSCVASGFTFSFYSMNWVRQAPGKGLDWVSSISSSGNYIYYADSVKGRFTISRDNAKNSLHLHMNSLKAEDTAMYFCARSYSGSYDAFDFWGQGTMVTVSSASTKGPSVFPLAPSSKSTSGGTAALGCLVKDYFPEPVTVSWNSGALTSGVHTFPAVLQSSGLYSLSSVVTVPSSSLGTQTYICNVNHKPSNTKVDKKVEPKSCDKTHTCPPCPAPEAAGGPSVFLFPPKPKDTLMISRTPEVTCVVVSVSHEDPEVKFNWYVDGVEVHNAKTKPREEQYNSTYRVVSVLTVLHQDWLNGKEYKCKVSNKALPAPIEKTISKAKGQPREPQVYTLPPSREEMTKNQVSLSCAVKGFYPSDIAVEWESNGQPENNYKTTPPVLDSDGSFFLVSKLTVDKSRWQQGNVFSCSVMHEALHNRFTQKSLSLSPGK

SEQ ID NO: 1460 - protein, 215 aa, Artificial Sequence
  source: /note="Description of Artificial Sequence: Synthetic polypeptide"
EIVMTQSPGTLSLSPGERATLSCRASQSVSSSFLAWYQQKPGQAPRLLISGASSRATGIPDRFSVSGSGTDFTLTISRLEPEDFAVYYCQQYGVSPWTFGQGTKVEIKRTVAAPSVFIFPPSDEQLKSGTASVVCLLNNFYPREAKVQWKVDNALQSGNSQESVTEQDSKDSTYSLSSTLTLSKADYEKHKVYACEVTHQGLSSPVTKSFNRGEC

SEQ ID NO: 1461 - protein, 451 aa, Artificial Sequence; identical to SEQ ID NO: 1246
  source: /note="Description of Artificial Sequence: Synthetic polypeptide"

SEQ ID NO: 1462 - protein, 216 aa, Artificial Sequence; identical to SEQ ID NO: 1243
  source: /note="Description of Artificial Sequence: Synthetic polypeptide"

SEQ ID NO: 1463 - protein, 746 aa, Artificial Sequence
  source: /note="Description of Artificial Sequence: Synthetic polypeptide"
EIVLTQSPATLSASPGERVTLSCSASSSVSYMNWYQQKPGQAPRRWIYDSSKLASGVPARFSGSGSGRDYTLTISSLEPEDFAVYYCQQWSRNPPTFGGGTKVEIKGGSEGKSSGSGSESKSTGGSQVQLVQSGAEVKKPGSSVKVSCKASGYTFTRSTMHWVKQAPGQGLEWIGYINPSSAYTNYNQKFQGRVTLTADKSTSTAYMELSSLRSEDTAVYYCASPQVHYDYAGFPYWGQGTLVTVSSEPKSSDKTHTCPPCPAPEAAGGPSVFLFPPKPKDTLMISRTPEVTCVVVSVSHEDPEVKFNWYVDGVEVHNAKTKPREEQYNSTYRVVSVLTVLHQDWLNGKEYKCKVSNKALPAPIEKTISKAKGQPREPQVYTLPPSREEMTKNQVSLWCLVKGFYPSDIAVEWESNGQPENNYKTTPPVLDSDGSFFLYSKLTVDKSRWQQGNVFSCSVMHEALHNHYTQKSLSLSPGKGGSEGKSSGSGSESKSTGGSAIQLTQSPSSLSASVGDRVTITCRASSSVSYIHWFQQKPGKAPKPLIYATSNLASGVPSRFSGSGSGTDFTLTISSLQPEDFATYYCQQWTSNPPTFGQGTKLEIKGGSEGKSSGSGSESKSTGGSQVQLVQSGAEVKKPGSSVKVSCKASGYTFTSYNMHWVRQAPGQGLEWMGAIYPGNGDTSYAQKFQGRVTITADKSTSTAYMELSSLRSEDTAVYYCARSTYYGGDWYFNVWGQGTLVTVSS

SEQ ID NO: 1464 - DNA, 2238 bp, Artificial Sequence
  source: /note="Description of Artificial Sequence: Synthetic polynucleotide"
gagatcgtgctgacccagtctcctgccacactgagtgcttctccaggcgagagagtgaccctgtcctgctccgcttcctcctccgtgtcctacatgaactggtatcagcagaagcccggccaggctcctcggagatggatctacgactcttccaagctggcctctggtgtgccagccagattttctggctctggctccggcagagactataccctgaccatctccagcctggaacctgaggacttcgccgtgtactactgccagcagtggtctaggaaccctcctacctttggcggaggcaccaaggtggaaatcaagggcggatctgagggaaagtccagcggctccggcagcgaaagcaagtccaccggcggaagccaggttcaactggttcagtctggcgccgaagtgaagaaacctggctcctccgtcaaggtgtcctgcaaggcttccggctacacctttaccagatccaccatgcactgggtcaagcaggcccctggacaaggcttggagtggatcggctacatcaaccccagctccgcctacaccaactacaaccagaaattccagggcagagtgaccctgaccgccgacaagtctacctccaccgcctacatggaactgtccagcctgagatctgaggacaccgccgtgtactactgcgcctctcctcaggtccactacgactacgccggctttccttattggggccagggcacactggtcaccgtttcttctgagcccaaatctagcgacaaaactcacacatgcccaccgtgcccagcacctgaagccgccgggggaccgtcagtcttcctcttccccccaaaacccaaggacaccctcatgatctcccggacccctgaggtcacatgcgtggtggtgagcgtgagccacgaagaccctgaggtcaagttcaactggtacgtggacggcgtggaggtgcataatgccaagacaaagccgcgggaggagcagtacaacagcacgtaccgtgtggtcagcgtcctcaccgtcctgcaccaggactggctgaatggcaaggagtacaagtgcaaggtgtcgaacaaagccctcccagcccccatcgagaaaaccatctccaaagccaaagggcagccccgagaaccacaggtgtacaccctgcccccatcccgggaggagatgaccaagaaccaggtcagcctgtggtgcctggtcaaaggcttctatcccagcgacatcgccgtggagtgggagagcaatgggcagccggagaacaactacaagaccacgcctcccgtgctggactccgacggctccttcttcctctacagcaagctcaccgtggacaagagcagatggcagcaggggaacgtcttctcatgctccgtgatgcatgaggctctgcacaaccactacacgcagaagtctctctccctgtctccgggaaaaggagggagcgagggaaagtccagcggaagcggctctgagtccaaatccaccggagggagcgccattcagctgacccagtctccatcctctctgtccgcctctgtgggcgacagagtgacaattacctgccgggcctcctcctccgtgtcctacatccattggttccagcagaagcccggcaaggcccctaagcctctgatctacgccacctccaatctggcctctggcgtgccctccagattttccggatctggctctggaaccgactttaccctgacaatctccagcctgcagcctgaggacttcgccacctactactgtcagcagtggaccagcaatcctcctacctttggccagggcaccaagctggaaatcaagggcggctccgagggcaagagcagcggcagcggcagcgagagcaagagcaccggcggcagccaggttcagctggttcagtctggtgccgaagtgaagaaacctggctcctccgtgaaagtgtcctgcaaggcttccggctacacttttaccagctacaacatgcactgggtccgacaggcccctggacaaggattggaatggatgggcgctatctaccccggcaacggcgatacctcttacgcccagaaattccagggcagagtgaccatcaccgccgacaagtctacctccaccgcctacatggaactgtccagcctgagatctgaggacaccgccgtgtactactgcgcccggtctacctattatggcggcgactggtacttcaacgtgtggggccagggaaccctggtcacagtctcttct

SEQ ID NO: 1465 - protein, 746 aa, Artificial Sequence
  source: /note="Description of Artificial Sequence: Synthetic polypeptide"
EIVLTQSPATLSASPGERVTLSCSASSSVSYMNWYQQKPGQAPRRWIYDSSKLASGVPARFSGSGSGRDYTLTISSLEPEDFAVYYCQQWSRNPPTFGGGTKVEIKGGSEGKSSGSGSESKSTGGSQVQLVQSGAEVKKPGSSVKVSCKASGYTFTRSTMHWVRQAPGQGLEWMGYINPSSAYTNYAQKFQGRVTLTADKSTSTAYMELSSLRSEDTAVYYCASPQVHYDYGGFPYWGQGTLVTVSSEPKSSDKTHTCPPCPAPEAAGGPSVFLFPPKPKDTLMISRTPEVTCVVVSVSHEDPEVKFNWYVDGVEVHNAKTKPREEQYNSTYRVVSVLTVLHQDWLNGKEYKCKVSNKALPAPIEKTISKAKGQPREPQVYTLPPSREEMTKNQVSLWCLVKGFYPSDIAVEWESNGQPENNYKTTPPVLDSDGSFFLYSKLTVDKSRWQQGNVFSCSVMHEALHNHYTQKSLSLSPGKGGSEGKSSGSGSESKSTGGSAIQLTQSPSSLSASVGDRVTITCRASSSVSYIHWFQQKPGKAPKPLIYATSNLASGVPSRFSGSGSGTDFTLTISSLQPEDFATYYCQQWTSNPPTFGQGTKLEIKGGSEGKSSGSGSESKSTGGSQVQLVQSGAEVKKPGSSVKVSCKASGYTFTSYNMHWVRQAPGQGLEWMGAIYPGNGDTSYAQKFQGRVTITADKSTSTAYMELSSLRSEDTAVYYCARSTYYGGDWYFNVWGQGTLVTVSS

SEQ ID NO: 1466 - DNA, 2238 bp, Artificial Sequence
  source: /note="Description of Artificial Sequence: Synthetic polynucleotide"
gagatcgtgctgacccagtctcctgccacactgagtgcttctccaggcgagagagtgaccctgtcctgctccgcttcctcctccgtgtcctacatgaactggtatcagcagaagcccggccaggctcctcggagatggatctacgactcttccaagctggcctctggtgtgccagccagattttctggctctggctccggcagagactataccctgaccatctccagcctggaacctgaggacttcgccgtgtactactgccagcagtggtctaggaaccctcctacctttggcggaggcaccaaggtggaaatcaagggcggatctgagggaaagtccagcggctccggcagcgaaagcaagtccaccggcggaagccaggttcaactggttcagtctggcgccgaagtgaagaaacctggctcctccgtgaaagtgtcctgcaaggcttccggctacacttttaccagatccaccatgcactgggtccgacaggctccaggacaaggcttggagtggatgggctacatcaaccccagctccgcctacaccaactacgcccagaaattccagggcagagtgaccctgaccgccgacaagtctacctccaccgcctacatggaactgtccagcctgagatctgaggacaccgccgtgtactactgcgcttctcctcaggtgcactacgactacggcggctttccttattggggccagggcacactggtcaccgtttcttctgagcccaaatctagcgacaaaactcacacatgcccaccgtgcccagcacctgaagccgccgggggaccgtcagtcttcctcttccccccaaaacccaaggacaccctcatgatctcccggacccctgaggtcacatgcgtggtggtgagcgtgagccacgaagaccctgaggtcaagttcaactggtacgtggacggcgtggaggtgcataatgccaagacaaagccgcgggaggagcagtacaacagcacgtaccgtgtggtcagcgtcctcaccgtcctgcaccaggactggctgaatggcaaggagtacaagtgcaaggtgtcgaacaaagccctcccagcccccatcgagaaaaccatctccaaagccaaagggcagccccgagaaccacaggtgtacaccctgcccccatcccgggaggagatgaccaagaaccaggtcagcctgtggtgcctggtcaaaggcttctatcccagcgacatcgccgtggagtgggagagcaatgggcagccggagaacaactacaagaccacgcctcccgtgctggactccgacggctccttcttcctctacagcaagctcaccgtggacaagagcagatggcagcaggggaacgtcttctcatgctccgtgatgcatgaggctctgcacaaccactacacgcagaagtctctctccctgtctccgggaaaaggagggagcgagggaaagtccagcggaagcggctctgagtccaaatccaccggagggagcgccattcagctgacccagtctccatcctctctgtccgcctctgtgggcgacagagtgacaattacctgccgggcctcctcctccgtgtcctacatccattggttccagcagaagcccggcaaggcccctaagcctctgatctacgccacctccaatctggcctctggcgtgccctccagattttccggatctggctctggaaccgactttaccctgacaatctccagcctgcagcctgaggacttcgccacctactactgtcagcagtggaccagcaatcctcctacctttggccagggcaccaagctggaaatcaagggcggctccgagggcaagagcagcggcagcggcagcgagagcaagagcaccggcggcagccaggttcagctggttcagtctggtgccgaagtgaagaaacctggctcctccgtgaaagtgtcctgcaaggcttccggctacacttttaccagctacaacatgcactgggtccgacaggcccctggacaaggattggaatggatgggcgctatctaccccggcaacggcgatacctcttacgcccagaaattccagggcagagtgaccatcaccgccgacaagtctacctccaccgcctacatggaactgtccagcctgagatctgaggacaccgccgtgtactactgcgcccggtctacctattatggcggcgactggtacttcaacgtgtggggccagggaaccctggtcacagtctcttct

SEQ ID NO: 1467 - protein, 732 aa, Artificial Sequence
  source: /note="Description of Artificial Sequence: Synthetic polypeptide"
DIQMTQSPSSLSASVGDRVTITCRARQSIGTAIHWYQQKPGKAPKLLIKYASESISGVPSRFSGSGSGTDFTLTISSLQPEDFATYYCQQSGSWPYTFGQGTKLEIKGGSEGKSSGSGSESKSTGGSEVQLVESGGGLVKPGGSLRLSCAASGFTFSRYNMNWVRQAPGKGLEWVSSISTSSNYIYYADSVKGRFTFSRDNAKNSLDLQMSGLRAEDTAIYYCTRGWGPFDYWGQGTLVTVSSEPKSSDKTHTCPPCPAPEAAGGPSVFLFPPKPKDTLMISRTPEVTCVVVSVSHEDPEVKFNWYVDGVEVHNAKTKPREEQYNSTYRVVSVLTVLHQDWLNGKEYKCKVSNKALPAPIEKTISKAKGQPREPQVYTLPPSREEMTKNQVSLWCLVKGFYPSDIAVEWESNGQPENNYKTTPPVLDSDGSFFLYSKLTVDKSRWQQGNVFSCSVMHEALHNHYTQKSLSLSPGKGGGGSGGGGSAIQLTQSPSSLSASVGDRVTITCRASSSVSYIHWFQQKPGKAPKPLIYATSNLASGVPSRFSGSGSGTDFTLTISSLQPEDFATYYCQQWTSNPPTFGQGTKLEIKGGSEGKSSGSGSESKSTGGSQVQLVQSGAEVKKPGSSVKVSCKASGYTFTSYNMHWVRQAPGQGLEWMGAIYPGNGDTSYAQKFQGRVTITADKSTSTAYMELSSLRSEDTAVYYCARSTYYGGDWYFNVWGQGTLVTVSS

SEQ ID NO: 1468 - DNA, 2196 bp, Artificial Sequence
  source: /note="Description of Artificial Sequence: Synthetic polynucleotide"
gacatacaaatgacacaatcaccctcttctctttctgcaagcgttggcgaccgtgtcactatcacttgtcgagcccgccagtccataggtactgccattcactggtatcaacagaagcctggcaaggctcccaaactcctgattaagtatgccagcgagagcatttccggcgtaccttcaagattttccggctccggtagtgggacagatttcactctcactatatctagcctccaaccagaagatttcgccacttactactgtcaacaatcaggttcatggccttacactttcggccaggggacaaaattggagatcaagggcggctccgagggcaagagcagcggcagcggcagcgagagcaagagcaccggcggcagcgaggtgcaactggtggagtctgggggaggcctggtcaagcctggggggtccctgagactctcctgtgcagcctctggattcaccttcagtagatataacatgaactgggtccgccaggctccagggaaggggctggagtgggtctcatccattagtactagtagtaattacatatactacgcagactcagtgaagggccgattcaccttctccagagacaacgccaagaactcactggatctgcaaatgagcggcctgagagccgaggacacggctatttattactgtacgagaggctgggggccttttgactactggggccagggaaccctggtcaccgtctcctcagagcccaaatctagcgacaaaactcacacatgtccaccgtgcccagcacctgaagcagcagggggaccgtcagtcttcctcttccccccaaaacccaaggacaccctcatgatctcccggacccctgaggtcacatgcgtggtggtgagcgtgagccacgaagaccctgaggtcaagttcaactggtacgtggacggcgtggaggtgcataatgccaagacaaagccgcgggaggagcagtacaacagcacgtaccgtgtggtcagcgtcctcaccgtcctgcaccaggactggctgaatggcaaggagtacaagtgcaaggtctccaacaaagccctcccagcccccatcgagaaaaccatctccaaagccaaagggcagccccgagaaccacaggtgtacaccctgcccccatcccgggaggagatgaccaagaaccaggtcagcctgtggtgcctggtcaaaggcttctatcccagcgacatcgccgtggagtgggagagcaatgggcagccggagaacaactacaagaccacgcctcccgtgctggactccgacggctccttcttcctctacagcaagctcaccgtggacaagtctagatggcagcaggggaacgtcttctcatgctccgtgatgcatgaggctctgcacaaccactacacgcagaagagcctctccctgtctccgggtaaaggaggcggagggagtggcgggggaggctctgcaatccaactaactcaaagtccaagtagtctgtctgcttccgtgggcgacagagtgacaatcacctgtagagcctccagcagcgtctcctacatccactggttccagcaaaaacctggcaaggcccctaagcctctgatctacgccacctccaacctggcctctggcgtgccctctcggttctccggctctggctccggaaccgacttcaccctgaccatctccagcctgcagcctgaggattttgctacctactactgccagcagtggacctctaaccctccaacattcggccagggcaccaagctggaaatcaagggcggctccgagggcaagagcagcggcagcggcagcgagagcaagagcaccggcggcagccaagtgcaattagtgcaaagtggtgcagaagtcaagaagcctggaagctccgtgaaagtgtcctgcaaggcctctggctacacctttacctcctacaacatgcactgggtgcggcaggctcctggccagggcctggagtggatgggcgctatctaccccggcaacggcgatacctcttacgcccagaagttccagggcagagtgaccatcaccgccgacaagtccacatctacagcctacatggaactgtcctccctgcggtccgaggacaccgctgtgtactattgtgccagatctacctactacggcggcgactggtacttcaacgtgtggggccaaggaaccctggtgaccgtgtctagc

SEQ ID NO: 1469 - protein, 736 aa, Artificial Sequence
  source: /note="Description of Artificial Sequence: Synthetic polypeptide"
QVQLVQSGAEVKKPGSSVKVSCKASGYTFTRSTMHWVRQAPGQGLEWMGYINPSSAYTNYAQKFQGRVTLTADKSTSTAYMELSSLRSEDTAVYYCASPQVHYDYGGFPYWGQGTLVTVSSGGSEGKSSGSGSESKSTGGSEIVLTQSPATLSASPGERVTLSCSASSSVSYMNWYQQKPGQAPRRWIYDSSKLASGVPARFSGSGSGRDYTLTISSLEPEDFAVYYCQQWSRNPPTFGGGTKVEIKEPKSSDKTHTCPPCPAPEAAGGPSVFLFPPKPKDTLMISRTPEVTCVVVSVSHEDPEVKFNWYVDGVEVHNAKTKPREEQYNSTYRVVSVLTVLHQDWLNGKEYKCKVSNKALPAPIEKTISKAKGQPREPQVYTLPPSREEMTKNQVSLWCLVKGFYPSDIAVEWESNGQPENNYKTTPPVLDSDGSFFLYSKLTVDKSRWQQGNVFSCSVMHEALHNHYTQKSLSLSPGKGGGGSGGGGSAIQLTQSPSSLSASVGDRVTITCRASSSVSYIHWFQQKPGKAPKPLIYATSNLASGVPSRFSGSGSGTDFTLTISSLQPEDFATYYCQQWTSNPPTFGQGTKLEIKGGSEGKSSGSGSESKSTGGSQVQLVQSGAEVKKPGSSVKVSCKASGYTFTSYNMHWVRQAPGQGLEWMGAIYPGNGDTSYAQKFQGRVTITADKSTSTAYMELSSLRSEDTAVYYCARSTYYGGDWYFNVWGQGTLVTVSS

SEQ ID NO: 1470 - DNA, 2208 bp, Artificial Sequence
  source: /note="Description of Artificial Sequence: Synthetic polynucleotide"
caggtgcagctggtgcagagcggcgccgaggtgaagaagcctggcagcagcgtgaaggtgagctgtaaggccagcggctacactttcactaggagcactatgcactgggtgaggcaggcccctggccagggcctggagtggatgggctacatcaatcctagcagcgcctacactaattacgcccagaagttccagggcagggtgactctgactgccgataagagcactagcactgcctacatggagctgagcagcctgaggagcgaggatactgccgtgtactactgtgccagccctcaggtgcactacgattacggcggcttcccttactggggccagggcactctggtgactgtgagcagcggcggctccgagggcaagagcagcggcagcggcagcgagagcaagagcaccggcggcagcgagatcgtgctgactcagagccctgccactctgagcgccagccctggcgagagggtgactctgagctgtagcgccagcagcagcgtgagctacatgaattggtaccagcagaagcctggccaggcccctaggaggtggatctacgatagcagcaagctggccagcggcgtgcctgccaggttcagcggcagcggcagcggcagggattacactctgactatcagcagcctggagcctgaggatttcgccgtgtactactgtcagcagtggagcaggaatcctcctactttcggcggcggcactaaggtggagatcaaggagcccaaatctagcgacaaaactcacacatgtccaccgtgcccagcacctgaagcagcagggggaccgtcagtcttcctcttccccccaaaacccaaggacaccctcatgatctcccggacccctgaggtcacatgcgtggtggtgagcgtgagccacgaagaccctgaggtcaagttcaactggtacgtggacggcgtggaggtgcataatgccaagacaaagccgcgggaggagcagtacaacagcacgtaccgtgtggtcagcgtcctcaccgtcctgcaccaggactggctgaatggcaaggagtacaagtgcaaggtctccaacaaagccctcccagcccccatcgagaaaaccatctccaaagccaaagggcagccccgagaaccacaggtgtacaccctgcccccatcccgggaggagatgaccaagaaccaggtcagcctgtggtgcctggtcaaaggcttctatcccagcgacatcgccgtggagtgggagagcaatgggcagccggagaacaactacaagaccacgcctcccgtgctggactccgacggctccttcttcctctacagcaagctcaccgtggacaagtctagatggcagcaggggaacgtcttctcatgctccgtgatgcatgaggctctgcacaaccactacacgcagaagagcctctccctgtctccgggtaaaggaggcggagggagtggcgggggaggctctgcaatccaactaactcaaagtccaagtagtctgtctgcttccgtgggcgacagagtgacaatcacctgtagagcctccagcagcgtctcctacatccactggttccagcaaaaacctggcaaggcccctaagcctctgatctacgccacctccaacctggcctctggcgtgccctctcggttctccggctctggctccggaaccgacttcaccctgaccatctccagcctgcagcctgaggattttgctacctactactgccagcagtggacctctaaccctccaacattcggccagggcaccaagctggaaatcaagggcggctccgagggcaagagcagcggcagcggcagcgagagcaagagcaccggcggcagccaagtgcaattagtgcaaagtggtgcagaagtcaagaagcctggaagctccgtgaaagtgtcctgcaaggcctctggctacacctttacctcctacaacatgcactgggtgcggcaggctcctggccagggcctggagtggatgggcgctatctaccccggcaacggcgatacctcttacgcccagaagttccagggcagagtgaccatcaccgccgacaagtccacatctacagcctacatggaactgtcctccctgcggtccgaggacaccgctgtgtactattgtgccagatctacctactacggcggcgactggtacttcaacgtgtggggccaaggaaccctggtgaccgtgtctagc

SEQ ID NO: 1471 - protein, 732 aa, Artificial Sequence
  source: /note="Description of Artificial Sequence: Synthetic polypeptide"
DIQMTQSPSSLSASVGDRVTITCRARQSIGTAIHWYQQKPGKAPKLLIKYASESISGVPSRFSGSGSGTDFTLTISSLQPEDFATYYCQQSGSWPYTFGQGTKLEIKGGSEGKSSGSGSESKSTGGSEVQLVESGGGLVKPGGSLRLSCAASGFTFSRYNMNWVRQAPGKGLEWVSSISTSSNYIYYADSVKGRFTFSRDNAKNSLDLQMSGLRAEDTAIYYCTRGWGPFDYWGQGTLVTVSSEPKSSDKTHTCPPCPAPEAAGGPSVFLFPPKPKDTLMISRTPEVTCVVVSVSHEDPEVKFNWYVDGVEVHNAKTKPREEQYNSTYRVVSVLTVLHQDWLNGKEYKCKVSNKALPAPIEKTISKAKGQPREPQVYTLPPSREEMTKNQVSLWCLVKGFYPSDIAVEWESNGQPENNYKTTPPVLDSDGSFFLYSKLTVDKSRWQQGNVFSCSVMHEALHNHYTQKSLSLSPGKGGGGSGGGGSQIVLSQSPAILSASPGEKVTMTCRASSSVSYMHWYQQKPGSSPQVWIYATSNLASGVPVRFSGSGSGTSYSLTISRVEAEDTATYYCQQWIFNPPTFGSGTKLEIRGGSEGKSSGSGSESKSTGGSQAYLQQSGAELVRPGASVKMSCKASGYTFTSYNMHWVKQTPRQGLEWIGAIYPGNGDTSYNQKFKGKATLTVDKSSSTAYMQLSSLTSEDSAVYFCARVYYGSNYWYFDVWGTGTTVTVSS

SEQ ID NO: 1472 - DNA, 2196 bp, Artificial Sequence
  source: /note="Description of Artificial Sequence: Synthetic polynucleotide"
gacatacaaatgacacaatcaccctcttctctttctgcaagcgttggcgaccgtgtcactatcacttgtcgagcccgccagtccataggtactgccattcactggtatcaacagaagcctggcaaggctcccaaactcctgattaagtatgccagcgagagcatttccggcgtaccttcaagattttccggctccggtagtgggacagatttcactctcactatatctagcctccaaccagaagatttcgccacttactactgtcaacaatcaggttcatggccttacactttcggccaggggacaaaattggagatcaagggcggctccgagggcaagagcagcggcagcggcagcgagagcaagagcaccggcggcagcgaggtgcaactggtggagtctgggggaggcctggtcaagcctggggggtccctgagactctcctgtgcagcctctggattcaccttcagtagatataacatgaactgggtccgccaggctccagggaaggggctggagtgggtctcatccattagtactagtagtaattacatatactacgcagactcagtgaagggccgattcaccttctccagagacaacgccaagaactcactggatctgcaaatgagcggcctgagagccgaggacacggctatttattactgtacgagaggctgggggccttttgactactggggccagggaaccctggtcaccgtctcctcagagcccaaatctagcgacaaaactcacacatgtccaccgtgcccagcacctgaagcagcagggggaccgtcagtcttcctcttccccccaaaacccaaggacaccctcatgatctcccggacccctgaggtcacatgcgtggtggtgagcgtgagccacgaagaccctgaggtcaagttcaactggtacgtggacggcgtggaggtgcataatgccaagacaaagccgcgggaggagcagtacaacagcacgtaccgtgtggtcagcgtcctcaccgtcctgcaccaggactggctgaatggcaaggagtacaagtgcaaggtctccaacaaagccctcccagcccccatcgagaaaaccatctccaaagccaaagggcagccccgagaaccacaggtgtacaccctgcccccatcccgggaggagatgaccaagaaccaggtcagcctgtggtgcctggtcaaaggcttctatcccagcgacatcgccgtggagtgggagagcaatgggcagccggagaacaactacaagaccacgcctcccgtgctggactccgacggctccttcttcctctacagcaagctcaccgtggacaagtctagatggcagcaggggaacgtcttctcatgctccgtgatgcatgaggctctgcacaaccactacacgcagaagagcctctccctgtctccgggtaaaggaggcggagggagtggcgggggaggctctcaaatagtcctttcacagtccccagctattctttcagcctctcccggtgaaaaggttacaatgacctgccgggcaagctccagtgtctcatatatgcactggtaccaacaaaaacctggcagtagtcctcaggtgtggatctacgctacaagcaatctcgcttccggggttcccgtgaggtttagcggaagcgggtctggaactagttattccttgacaattagtcgggttgaagccgaggacaccgccacttactattgccaacagtggatattcaatccacccaccttcggttcaggtaccaagctcgaaatccgtggcggctccgagggcaagagcagcggcagcggcagcgagagcaagagcaccggcggcagccaagcatatctgcaacagagcggagctgagctggttcggcctggcgcctctgtaaaaatgagttgcaaggccagtggttatacattcacatcatataatatgcactgggtaaagcaaactccccgacaggggcttgaatggattggcgcaatctatcccggcaatggggatacatcctacaatcagaaattcaagggcaaggcaacactgaccgttgacaaatcctcatcaacagcctacatgcagctcagttccctcactagcgaagattctgctgtgtatttctgtgcaagggtgtattatggttctaattactggtatttcgatgtttggggaaccggaactaccgtaactgtttctagc

SEQ ID NO: 1473 - protein, 733 aa, Artificial Sequence
  source: /note="Description of Artificial Sequence: Synthetic polypeptide"
DIQMTQSPSSLSASVGDRVTITCRARQSIGTAIHWYQQKPGKAPKLLIKYASESISGVPSRFSGSGSGTDFTLTISSLQPEDFATYYCQQSGSWPYTFGQGTKLEIKGGSEGKSSGSGSESKSTGGSEVQLVESGGGLVKPGGSLRLSCAASGFTFSRYNMNWVRQAPGKGLEWVSSISTSSNYIYYADSVKGRFTFSRDNAKNSLDLQMSGLRAEDTAIYYCTRGWGPFDYWGQGTLVTVSSEPKSSDKTHTCPPCPAPEAAGGPSVFLFPPKPKDTLMISRTPEVTCVVVSVSHEDPEVKFNWYVDGVEVHNAKTKPREEQYNSTYRVVSVLTVLHQDWLNGKEYKCKVSNKALPAPIEKTISKAKGQPREPQVYTLPPSREEMTKNQVSLWCLVKGFYPSDIAVEWESNGQPENNYKTTPPVLDSDGSFFLYSKLTVDKSRWQQGNVFSCSVMHEALHNHYTQKSLSLSPGKGGGGSGGGGSQIVLSQSPAILSASPGEKVTMTCRASLSVSSMHWYQQKPGSSPKPWIYATSNLASGVPARFSGSGSGTSYSLTISRVEAEDAATYYCQQWIFNPPTFGGGTKLEIKGGSEGKSSGSGSESKSTGGSQAYLQQSGAELVRPGASVKMSCKTSGYTFSSYNMHWVKQTPRQALEWIGAIYPGNGDTSYNQKFKGKATLTVDKSSSTAYMQLSSLTSEDSAVYFCTRSNYYGSSGWYFDVWGTGTTVTVSS

SEQ ID NO: 1474 - DNA, 2199 bp, Artificial Sequence
  source: /note="Description of Artificial Sequence: Synthetic polynucleotide"
gacatacaaatgacacaatcaccctcttctctttctgcaagcgttggcgaccgtgtcactatcacttgtcgagcccgccagtccataggtactgccattcactggtatcaacagaagcctggcaaggctcccaaactcctgattaagtatgccagcgagagcatttccggcgtaccttcaagattttccggctccggtagtgggacagatttcactctcactatatctagcctccaaccagaagatttcgccacttactactgtcaacaatcaggttcatggccttacactttcggccaggggacaaaattggagatcaagggcggctccgagggcaagagcagcggcagcggcagcgagagcaagagcaccggcggcagcgaggtgcaactggtggagtctgggggaggcctggtcaagcctggggggtccctgagactctcctgtgcagcctctggattcaccttcagtagatataacatgaactgggtccgccaggctccagggaaggggctggagtgggtctcatccattagtactagtagtaattacatatactacgcagactcagtgaagggccgattcaccttctccagagacaacgccaagaactcactggatctgcaaatgagcggcctgagagccgaggacacggctatttattactgtacgagaggctgggggccttttgactactggggccagggaaccctggtcaccgtctcctcagagcccaaatctagcgacaaaactcacacatgtccaccgtgcccagcacctgaagcagcagggggaccgtcagtcttcctcttccccccaaaacccaaggacaccctcatgatctcccggacccctgaggtcacatgcgtggtggtgagcgtgagccacgaagaccctgaggtcaagttcaactggtacgtggacggcgtggaggtgcataatgccaagacaaagccgcgggaggagcagtacaacagcacgtaccgtgtggtcagcgtcctcaccgtcctgcaccaggactggctgaatggcaaggagtacaagtgcaaggtctccaacaaagccctcccagcccccatcgagaaaaccatctccaaagccaaagggcagccccgagaaccacaggtgtacaccctgcccccatcccgggaggagatgaccaagaaccaggtcagcctgtggtgcctggtcaaaggcttctatcccagcgacatcgccgtggagtgggagagcaatgggcagccggagaacaactacaagaccacgcctcccgtgctggactccgacggctccttcttcctctacagcaagctcaccgtggacaagtctagatggcagcaggggaacgtcttctcatgctccgtgatgcatgaggctctgcacaaccactacacgcagaagagcctctccctgtctccgggtaaaggaggcggagggagtggcgggggaggctctcagattgtcctgagccaatccccagcaattctgagtgctagccctggagagaaggtaacaatgacttgtcgggcatcccttagcgtctcatccatgcattggtatcaacaaaagccaggttcatctccaaaaccctggatttacgctacatctaacctggcatctggggtgcctgccagatttagtggatctggttccggcacatcatattcccttacaatcagccgagtggaagccgaggatgctgcaacctattactgtcaacaatggatatttaaccctcccacctttgggggtgggactaaactcgaaatcaagggcggctccgagggcaagagcagcggcagcggcagcgagagcaagagcaccggcggcagccaagcctatcttcaacaatctggggctgagcttgtccggccaggagcctccgtcaaaatgagctgcaaaacctcaggttatacttttagtagctataacatgcattgggtaaaacaaaccccccgacaagcattggagtggataggggccatataccccggcaatggagacacaagttacaaccagaagtttaaaggcaaagctacactcacagttgacaaatcctcaagtactgcttatatgcaactctcctctctcacttccgaagacagtgccgtatatttttgcactcggtccaattactatggatctagtggctggtactttgacgtttggggcactgggacaactgttacagtgtccagc

SEQ ID NO: 1475 - protein, 736 aa, Artificial Sequence
  source: /note="Description of Artificial Sequence: Synthetic polypeptide"
EIVLTQSPATLSASPGERVTLSCSASSSVSYMNWYQQKPGQAPRRWIYDSSKLASGVPARFSGSGSGRDYTLTISSLEPEDFAVYYCQQWSRNPPTFGGGTKVEIKGGSEGKSSGSGSESKSTGGSQVQLVQSGAEVKKPGSSVKVSCKASGYTFTRSTMHWVKQAPGQGLEWIGYINPSSAYTNYNQKFQGRVTLTADKSTSTAYMELSSLRSEDTAVYYCASPQVHYDYAGFPYWGQGTLVTVSSEPKSSDKTHTCPPCPAPEAAGGPSVFLFPPKPKDTLMISRTPEVTCVVVSVSHEDPEVKFNWYVDGVEVHNAKTKPREEQYNSTYRVVSVLTVLHQDWLNGKEYKCKVSNKALPAPIEKTISKAKGQPREPQVYTLPPSREEMTKNQVSLWCLVKGFYPSDIAVEWESNGQPENNYKTTPPVLDSDGSFFLYSKLTVDKSRWQQGNVFSCSVMHEALHNHYTQKSLSLSPGKGGGGSGGGGSQIVLSQSPAILSASPGEKVTMTCRASSSVSYMHWYQQKPGSSPQVWIYATSNLASGVPVRFSGSGSGTSYSLTISRVEAEDTATYYCQQWIFNPPTFGSGTKLEIRGGSEGKSSGSGSESKSTGGSQAYLQQSGAELVRPGASVKMSCKASGYTFTSYNMHWVKQTPRQGLEWIGAIYPGNGDTSYNQKFKGKATLTVDKSSSTAYMQLSSLTSEDSAVYFCARVYYGSNYWYFDVWGTGTTVTVSS

SEQ ID NO: 1476 - DNA, 2208 bp, Artificial Sequence
  source: /note="Description of Artificial Sequence: Synthetic polynucleotide"
gagatcgtgctgactcagagccctgccactctgagcgccagccctggcgagagggtgactctgagctgtagcgccagcagcagcgtgagctacatgaattggtaccagcagaagcctggccaggcccctaggaggtggatctacgatagcagcaagctggccagcggcgtgcctgccaggttcagcggcagcggcagcggcagggattacactctgactatcagcagcctggagcctgaggatttcgccgtgtactactgtcagcagtggagcaggaatcctcctactttcggcggcggcactaaggtggagatcaagggcggctccgagggcaagagcagcggcagcggcagcgagagcaagagcaccggcggcagccaggtgcagctggtgcagagcggcgccgaggtgaagaagcctggcagcagcgtgaaggtgagctgtaaggccagcggctacactttcactaggagcactatgcactgggtgaagcaggcccctggccagggcctggagtggatcggctacatcaatcctagcagcgcctacactaattacaatcagaagttccagggcagggtgactctgactgccgataagagcactagcactgcctacatggagctgagcagcctgaggagcgaggatactgccgtgtactactgtgccagccctcaggtgcactacgattacgccggcttcccttactggggccagggcactctggtgactgtgagcagcgagcccaaatctagcgacaaaactcacacatgtccaccgtgcccagcacctgaagcagcagggggaccgtcagtcttcctcttccccccaaaacccaaggacaccctcatgatctcccggacccctgaggtcacatgcgtggtggtgagcgtgagccacgaagaccctgaggtcaagttcaactggtacgtggacggcgtggaggtgcataatgccaagacaaagccgcgggaggagcagtacaacagcacgtaccgtgtggtcagcgtcctcaccgtcctgcaccaggactggctgaatggcaaggagtacaagtgcaaggtctccaacaaagccctcccagcccccatcgagaaaaccatctccaaagccaaagggcagccccgagaaccacaggtgtacaccctgcccccatcccgggaggagatgaccaagaaccaggtcagcctgtggtgcctggtcaaaggcttctatcccagcgacatcgccgtggagtgggagagcaatgggcagccggagaacaactacaagaccacgcctcccgtgctggactccgacggctccttcttcctctacagcaagctcaccgtggacaagtctagatggcagcaggggaacgtcttctcatgctccgtgatgcatgaggctctgcacaaccactacacgcagaagagcctctccctgtctccgggtaaaggaggcggagggagtggcgggggaggctctcaaatagtcctttcacagtccccagctattctttcagcctctcccggtgaaaaggttacaatgacctgccgggcaagctccagtgtctcatatatgcactggtaccaacaaaaacctggcagtagtcctcaggtgtggatctacgctacaagcaatctcgcttccggggttcccgtgaggtttagcggaagcgggtctggaactagttattccttgacaattagtcgggttgaagccgaggacaccgccacttactattgccaacagtggatattcaatccacccaccttcggttcaggtaccaagctcgaaatccgtggcggctccgagggcaagagcagcggcagcggcagcgagagcaagagcaccggcggcagccaagcatatctgcaacagagcggagctgagctggttcggcctggcgcctctgtaaaaatgagttgcaaggccagtggttatacattcacatcatataatatgcactgggtaaagcaaactccccgacaggggcttgaatggattggcgcaatctatcccggcaatggggatacatcctacaatcagaaattcaagggcaaggcaacactgaccgttgacaaatcctcatcaacagcctacatgcagctcagttccctcactagcgaagattctgctgtgtatttctgtgcaagggtgtattatggttctaattactggtatttcgatgtttggggaaccggaactaccgtaactgtttctagc

SEQ ID NO: 1477 - protein, 737 aa, Artificial Sequence
  source: /note="Description of Artificial Sequence: Synthetic polypeptide"
EIVLTQSPATLSASPGERVTLSCSASSSVSYMNWYQQKPGQAPRRWIYDSSKLASGVPARFSGSGSGRDYTLTISSLEPEDFAVYYCQQWSRNPPTFGGGTKVEIKGGSEGKSSGSGSESKSTGGSQVQLVQSGAEVKKPGSSVKVSCKASGYTFTRSTMHWVKQAPGQGLEWIGYINPSSAYTNYNQKFQGRVTLTADKSTSTAYMELSSLRSEDTAVYYCASPQVHYDYAGFPYWGQGTLVTVSSEPKSSDKTHTCPPCPAPEAAGGPSVFLFPPKPKDTLMISRTPEVTCVVVSVSHEDPEVKFNWYVDGVEVHNAKTKPREEQYNSTYRVVSVLTVLHQDWLNGKEYKCKVSNKALPAPIEKTISKAKGQPREPQVYTLPPSREEMTKNQVSLWCLVKGFYPSDIAVEWESNGQPENNYKTTPPVLDSDGSFFLYSKLTVDKSRWQQGNVFSCSVMHEALHNHYTQKSLSLSPGKGGGGSGGGGSQIVLSQSPAILSASPGEKVTMTCRASLSVSSMHWYQQKPGSSPKPWIYATSNLASGVPARFSGSGSGTSYSLTISRVEAEDAATYYCQQWIFNPPTFGGGTKLEIKGGSEGKSSGSGSESKSTGGSQAYLQQSGAELVRPGASVKMSCKTSGYTFSSYNMHWVKQTPRQALEWIGAIYPGNGDTSYNQKFKGKATLTVDKSSSTAYMQLSSLTSEDSAVYFCTRSNYYGSSGWYFDVWGTGTTVTVSS

SEQ ID NO: 1478 - DNA, 2211 bp, Artificial Sequence
  source: /note="Description of Artificial Sequence: Synthetic polynucleotide"
gagatcgtgctgactcagagccctgccactctgagcgccagccctggcgagagggtgactctgagctgtagcgccagcagcagcgtgagctacatgaattggtaccagcagaagcctggccaggcccctaggaggtggatctacgatagcagcaagctggccagcggcgtgcctgccaggttcagcggcagcggcagcggcagggattacactctgactatcagcagcctggagcctgaggatttcgccgtgtactactgtcagcagtggagcaggaatcctcctactttcggcggcggcactaaggtggagatcaagggcggctccgagggcaagagcagcggcagcggcagcgagagcaagagcaccggcggcagccaggtgcagctggtgcagagcggcgccgaggtgaagaagcctggcagcagcgtgaaggtgagctgtaaggccagcggctacactttcactaggagcactatgcactgggtgaagcaggcccctggccagggcctggagtggatcggctacatcaatcctagcagcgcctacactaattacaatcagaagttccagggcagggtgactctgactgccgataagagcactagcactgcctacatggagctgagcagcctgaggagcgaggatactgccgtgtactactgtgccagccctcaggtgcactacgattacgccggcttcccttactggggccagggcactctggtgactgtgagcagcgagcccaaatctagcgacaaaactcacacatgtccaccgtgcccagcacctgaagcagcagggggaccgtcagtcttcctcttccccccaaaacccaaggacaccctcatgatctcccggacccctgaggtcacatgcgtggtggtgagcgtgagccacgaagaccctgaggtcaagttcaactggtacgtggacggcgtggaggtgcataatgccaagacaaagccgcgggaggagcagtacaacagcacgtaccgtgtggtcagcgtcctcaccgtcctgcaccaggactggctgaatggcaaggagtacaagtgcaaggtctccaacaaagccctcccagcccccatcgagaaaaccatctccaaagccaaagggcagccccgagaaccacaggtgtacaccctgcccccatcccgggaggagatgaccaagaaccaggtcagcctgtggtgcctggtcaaaggcttctatcccagcgacatcgccgtggagtgggagagcaatgggcagccggagaacaactacaagaccacgcctcccgtgctggactccgacggctccttcttcctctacagcaagctcaccgtggacaagtctagatggcagcaggggaacgtcttctcatgctccgtgatgcatgaggctctgcacaaccactacacgcagaagagcctctccctgtctccgggtaaaggaggcggagggagtggcgggggaggctctcagattgtcctgagccaatccccagcaattctgagtgctagccctggagagaaggtaacaatgacttgtcgggcatcccttagcgtctcatccatgcattggtatcaacaaaagccaggttcatctccaaaaccctggatttacgctacatctaacctggcatctggggtgcctgccagatttagtggatctggttccggcacatcatattcccttacaatcagccgagtggaagccgaggatgctgcaacctattactgtcaacaatggatatttaaccctcccacctttgggggtgggactaaactcgaaatcaagggcggctccgagggcaagagcagcggcagcggcagcgagagcaagagcaccggcggcagccaagcctatcttcaacaatctggggctgagcttgtccggccaggagcctccgtcaaaatgagctgcaaaacctcaggttatacttttagtagctataacatgcattgggtaaaacaaaccccccgacaagcattggagtggataggggccatataccccggcaatggagacacaagttacaaccagaagtttaaaggcaaagctacactcacagttgacaaatcctcaagtactgcttatatgcaactctcctctctcacttccgaagacagtgccgtatatttttgcactcggtccaattactatggatctagtggctggtactttgacgtttggggcactgggacaactgttacagtgtccagc

SEQ ID NO: 1479 - protein, 736 aa, Artificial Sequence
  source: /note="Description of Artificial Sequence: Synthetic polypeptide"
QVQLVQSGAEVKKPGSSVKVSCKASGYTFTRSTMHWVRQAPGQGLEWMGYINPSSAYTNYAQKFQGRVTLTADKSTSTAYMELSSLRSEDTAVYYCASPQVHYDYGGFPYWGQGTLVTVSSGGSEGKSSGSGSESKSTGGSEIVLTQSPATLSASPGERVTLSCSASSSVSYMNWYQQKPGQAPRRWIYDSSKLASGVPARFSGSGSGRDYTLTISSLEPEDFAVYYCQQWSRNPPTFGGGTKVEIKEPKSSDKTHTCPPCPAPEAAGGPSVFLFPPKPKDTLMISRTPEVTCVVVSVSHEDPEVKFNWYVDGVEVHNAKTKPREEQYNSTYRVVSVLTVLHQDWLNGKEYKCKVSNKALPAPIEKTISKAKGQPREPQVYTLPPSREEMTKNQVSLWCLVKGFYPSDIAVEWESNGQPENNYKTTPPVLDSDGSFFLYSKLTVDKSRWQQGNVFSCSVMHEALHNHYTQKSLSLSPGKGGGGSGGGGSQIVLSQSPAILSASPGEKVTMTCRASSSVSYMHWYQQKPGSSPQVWIYATSNLASGVPVRFSGSGSGTSYSLTISRVEAEDTATYYCQQWIFNPPTFGSGTKLEIRGGSEGKSSGSGSESKSTGGSQAYLQQSGAELVRPGASVKMSCKASGYTFTSYNMHWVKQTPRQGLEWIGAIYPGNGDTSYNQKFKGKATLTVDKSSSTAYMQLSSLTSEDSAVYFCARVYYGSNYWYFDVWGTGTTVTVSS

SEQ ID NO: 1480 - DNA, 2208 bp, Artificial Sequence
  source: /note="Description of Artificial Sequence: Synthetic polynucleotide"
caggtgcagctggtgcagagcggcgccgaggtgaagaagcctggcagcagcgtgaaggtgagctgtaaggccagcggctacactttcactaggagcactatgcactgggtgaggcaggcccctggccagggcctggagtggatgggctacatcaatcctagcagcgcctacactaattacgcccagaagttccagggcagggtgactctgactgccgataagagcactagcactgcctacatggagctgagcagcctgaggagcgaggatactgccgtgtactactgtgccagccctcaggtgcactacgattacggcggcttcccttactggggccagggcactctggtgactgtgagcagcggcggctccgagggcaagagcagcggcagcggcagcgagagcaagagcaccggcggcagcgagatcgtgctgactcagagccctgccactctgagcgccagccctggcgagagggtgactctgagctgtagcgccagcagcagcgtgagctacatgaattggtaccagcagaagcctggccaggcccctaggaggtggatctacgatagcagcaagctggccagcggcgtgcctgccaggttcagcggcagcggcagcggcagggattacactctgactatcagcagcctggagcctgaggatttcgccgtgtactactgtcagcagtggagcaggaatcctcctactttcggcggcggcactaaggtggagatcaaggagcccaaatctagcgacaaaactcacacatgtccaccgtgcccagcacctgaagcagcagggggaccgtcagtcttcctcttccccccaaaacccaaggacaccctcatgatctcccggacccctgaggtcacatgcgtggtggtgagcgtgagccacgaagaccctgaggtcaagttcaactggtacgtggacggcgtggaggtgcataatgccaagacaaagccgcgggaggagcagtacaacagcacgtaccgtgtggtcagcgtcctcaccgtcctgcaccaggactggctgaatggcaaggagtacaagtgcaaggtctccaacaaagccctcccagcccccatcgagaaaaccatctccaaagccaaagggcagccccgagaaccacaggtgtacaccctgcccccatcccgggaggagatgaccaagaaccaggtcagcctgtggtgcctggtcaaaggcttctatcccagcgacatcgccgtggagtgggagagcaatgggcagccggagaacaactacaagaccacgcctcccgtgctggactccgacggctccttcttcctctacagcaagctcaccgtggacaagtctagatggcagcaggggaacgtcttctcatgctccgtgatgcatgaggctctgcacaaccactacacgcagaagagcctctccctgtctccgggtaaaggaggcggagggagtggcgggggaggctctcaaatagtcctttcacagtccccagctattctttcagcctctcccggtgaaaaggttacaatgacctgccgggcaagctccagtgtctcatatatgcactggtaccaacaaaaacctggcagtagtcctcaggtgtggatctacgctacaagcaatctcgcttccggggttcccgtgaggtttagcggaagcgggtctggaactagttattccttgacaattagtcgggttgaagccgaggacaccgccacttactattgccaacagtggatattcaatccacccaccttcggttcaggtaccaagctcgaaatccgtggcggctccgagggcaagagcagcggcagcggcagcgagagcaagagcaccggcggcagccaagcatatctgcaacagagcggagctgagctggttcggcctggcgcctctgtaaaaatgagttgcaaggccagtggttatacattcacatcatataatatgcactgggtaaagcaaactccccgacaggggcttgaatggattggcgcaatctatcccggcaatggggatacatcctacaatcagaaattcaagggcaaggcaacactgaccgttgacaaatcctcatcaacagcctacatgcagctcagttccctcactagcgaagattctgctgtgtatttctgtgcaagggtgtattatggttctaattactggtatttcgatgtttggggaaccggaactaccgtaactgtttctagc

SEQ ID NO: 1481 - protein, 737 aa, Artificial Sequence
  source: /note="Description of Artificial Sequence: Synthetic polypeptide"
QVQLVQSGAEVKKPGSSVKVSCKASGYTFTRSTMHWVRQAPGQGLEWMGYINPSSAYTNYAQKFQGRVTLTADKSTSTAYMELSSLRSEDTAVYYCASPQVHYDYGGFPYWGQGTLVTVSSGGSEGKSSGSGSESKSTGGSEIVLTQSPATLSASPGERVTLSCSASSSVSYMNWYQQKPGQAPRRWIYDSSKLASGVPARFSGSGSGRDYTLTISSLEPEDFAVYYCQQWSRNPPTFGGGTKVEIKEPKSSDKTHTCPPCPAPEAAGGPSVFLFPPKPKDTLMISRTPEVTCVVVSVSHEDPEVKFNWYVDGVEVHNAKTKPREEQYNSTYRVVSVLTVLHQDWLNGKEYKCKVSNKALPAPIEKTISKAKGQPREPQVYTLPPSREEMTKNQVSLWCLVKGFYPSDIAVEWESNGQPENNYKTTPPVLDSDGSFFLYSKLTVDKSRWQQGNVFSCSVMHEALHNHYTQKSLSLSPGKGGGGSGGGGSQIVLSQSPAILSASPGEKVTMTCRASLSVSSMHWYQQKPGSSPKPWIYATSNLASGVPARFSGSGSGTSYSLTISRVEAEDAATYYCQQWIFNPPTFGGGTKLEIKGGSEGKSSGSGSESKSTGGSQAYLQQSGAELVRPGASVKMSCKTSGYTFSSYNMHWVKQTPRQALEWIGAIYPGNGDTSYNQKFKGKATLTVDKSSSTAYMQLSSLTSEDSAVYFCTRSNYYGSSGWYFDVWGTGTTVTVSS

SEQ ID NO: 1482 - DNA, 2211 bp, Artificial Sequence
  source: /note="Description of Artificial Sequence: Synthetic polynucleotide"
caggtgcagctggtgcagagcggcgccgaggtgaagaagcctggcagcagcgtgaaggtgagctgtaaggccagcggctacactttcactaggagcactatgcactgggtgaggcaggcccctggccagggcctggagtggatgggctacatcaatcctagcagcgcctacactaattacgcccagaagttccagggcagggtgactctgactgccgataagagcactagcactgcctacatggagctgagcagcctgaggagcgaggatactgccgtgtactactgtgccagccctcaggtgcactacgattacggcggcttcccttactggggccagggcactctggtgactgtgagcagcggcggctccgagggcaagagcagcggcagcggcagcgagagcaagagcaccggcggcagcgagatcgtgctgactcagagccctgccactctgagcgccagccctggcgagagggtgactctgagctgtagcgccagcagcagcgtgagctacatgaattggtaccagcagaagcctggccaggcccctaggaggtggatctacgatagcagcaagctggccagcggcgtgcctgccaggttcagcggcagcggcagcggcagggattacactctgactatcagcagcctggagcctgaggatttcgccgtgtactactgtcagcagtggagcaggaatcctcctactttcggcggcggcactaaggtggagatcaaggagcccaaatctagcgacaaaactcacacatgtccaccgtgcccagcacctgaagcagcagggggaccgtcagtcttcctcttccccccaaaacccaaggacaccctcatgatctcccggacccctgaggtcacatgcgtggtggtgagcgtgagccacgaagaccctgaggtcaagttcaactggtacgtggacggcgtggaggtgcataatgccaagacaaagccgcgggaggagcagtacaacagcacgtaccgtgtggtcagcgtcctcaccgtcctgcaccaggactggctgaatggcaaggagtacaagtgcaaggtctccaacaaagccctcccagcccccatcgagaaaaccatctccaaagccaaagggcagccccgagaaccacaggtgtacaccctgcccccatcccgggaggagatgaccaagaaccaggtcagcctgtggtgcctggtcaaaggcttctatcccagcgacatcgccgtggagtgggagagcaatgggcagccggagaacaactacaagaccacgcctcccgtgctggactccgacggctccttcttcctctacagcaagctcaccgtggacaagtctagatggcagcaggggaacgtcttctcatgctccgtgatgcatgaggctctgcacaaccactacacgcagaagagcctctccctgtctccgggtaaaggaggcggagggagtggcgggggaggctctcagattgtcctgagccaatccccagcaattctgagtgctagccctggagagaaggtaacaatgacttgtcgggcatcccttagcgtctcatccatgcattggtatcaacaaaagccaggttcatctccaaaaccctggatttacgctacatctaacctggcatctggggtgcctgccagatttagtggatctggttccggcacatcatattcccttacaatcagccgagtggaagccgaggatgctgcaacctattactgtcaacaatggatatttaaccctcccacctttgggggtgggactaaactcgaaatcaagggcggctccgagggcaagagcagcggcagcggcagcgagagcaagagcaccggcggcagccaagcctatcttcaacaatctggggctgagcttgtccggccaggagcctccgtcaaaatgagctgcaaaacctcaggttatacttttagtagctataacatgcattgggtaaaacaaaccccccgacaagcattggagtggataggggccatataccccggcaatggagacacaagttacaaccagaagtttaaaggcaaagctacactcacagttgacaaatcctcaagtactgcttatatgcaactctcctctctcacttccgaagacagtgccgtatatttttgcactcggtccaattactatggatctagtggctggtactttgacgtttggggcactgggacaactgttacagtgtccagc

SEQ ID NO: 1483 - protein, 747 aa, Artificial Sequence
  source: /note="Description of Artificial Sequence: Synthetic polypeptide"
EIVLTQSPATLSASPGERVTLSCSASSSVSYMNWYQQKPGQAPRRWIYDSSKLASGVPARFSGSGSGRDYTLTISSLEPEDFAVYYCQQWSRNPPTFGGGTKVEIKGGSEGKSSGSGSESKSTGGSQVQLVQSGAEVKKPGSSVKVSCKASGYTFTRSTMHWVKQAPGQGLEWIGYINPSSAYTNYNQKFQGRVTLTADKSTSTAYMELSSLRSEDTAVYYCASPQVHYDYAGFPYWGQGTLVTVSSEPKSSDKTHTCPPCPAPEAAGGPSVFLFPPKPKDTLMISRTPEVTCVVVSVSHEDPEVKFNWYVDGVEVHNAKTKPREEQYNSTYRVVSVLTVLHQDWLNGKEYKCKVSNKALPAPIEKTISKAKGQPREPQVYTLPPSREEMTKNQVSLSCAVKGFYPSDIAVEWESNGQPENNYKTTPPVLDSDGSFFLVSKLTVDKSRWQQGNVFSCSVMHEALHNRFTQKSLSLSPGKGGGGSGGGGSGGGGSGGGGSQIVLSQSPAILSASPGEKVTMTCRASLSVSSMHWYQQKPGSSPKPWIYATSNLASGVPARFSGSGSGTSYSLTISRVEAEDAATYYCQQWIFNPPTFGGGTKLEIKGGSEGKSSGSGSESKSTGGSQAYLQQSGAELVRPGASVKMSCKTSGYTFSSYNMHWVKQTPRQALEWIGAIYPGNGDTSYNQKFKGKATLTVDKSSSTAYMQLSSLTSEDSAVYFCTRSNYYGSSGWYFDVWGTGTTVTVSS

SEQ ID NO: 1484 - DNA, 2241 bp, Artificial Sequence
  source: /note="Description of Artificial Sequence: Synthetic polynucleotide"
gagatcgtgctgacccagtctcctgccacactgagtgcttctccaggcgagagagtgaccctgtcctgctccgcttcctcctccgtgtcctacatgaactggtatcagcagaagcccggccaggctcctcggagatggatctacgactcttccaagctggcctctggtgtgccagccagattttctggctctggctccggcagagactataccctgaccatctccagcctggaacctgaggacttcgccgtgtactactgccagcagtggtctaggaaccctcctacctttggcggaggcaccaaggtggaaatcaagggcggatctgagggaaagtccagcggctccggcagcgaaagcaagtccaccggcggaagccaggttcaactggttcagtctggcgccgaagtgaagaaacctggctcctccgtcaaggtgtcctgcaaggcttccggctacacctttaccagatccaccatgcactgggtcaagcaggcccctggacaaggcttggagtggatcggctacatcaaccccagctccgcctacaccaactacaaccagaaattccagggcagagtgaccctgaccgccgacaagtctacctccaccgcctacatggaactgtccagcctgagatctgaggacaccgccgtgtactactgcgcctctcctcaggtccactacgactacgccggctttccttattggggccagggcacactggtcaccgtttcttctgagcccaaatctagcgacaaaactcacacatgcccaccgtgcccagcacctgaagccgccgggggaccgtcagtcttcctcttccccccaaaacccaaggacaccctcatgatctcccggacccctgaggtcacatgcgtggtggtgagcgtgagccacgaagaccctgaggtcaagttcaactggtacgtggacggcgtggaggtgcataatgccaagacaaagccgcgggaggagcagtacaacagcacgtaccgtgtggtcagcgtcctcaccgtcctgcaccaggactggctgaatggcaaggagtacaagtgcaaggtgtcgaacaaagccctcccagcccccatcgagaaaaccatctccaaagccaaagggcagccccgagaaccacaggtgtacaccctgcccccatcccgggaggagatgaccaagaaccaggtcagcctgtcctgcgccgtcaaaggcttctatcccagcgacatcgccgtggagtgggagagcaatgggcagccggagaacaactacaagaccacgcctcccgtgctggactccgacggctccttcttcctcgtgagcaagctcaccgtggacaagagcagatggcagcaggggaacgtcttctcatgctccgtgatgcatgaggctctgcacaaccggttcacgcagaagtctctctccctgtctccgggaaaaggaggcggaggatctggcggaggtggaagtggcggaggcggttctggtggtggtggatctcagatcgtgctgtctcagtctccagctatcctgtctgctagccctggcgagaaagtgaccatgacctgtagagccagcctgtccgtgtcctccatgcactggtatcagcagaagcctggcagctcccctaagccttggatctacgccacctccaatctggcctctggcgtgccagctagattctccggatctggctccggcacctcctacagcctgacaatctccagagtggaagccgaggatgccgccacctactactgtcagcagtggatcttcaaccctcctaccttcggcggaggcaccaagctggaaatcaagggagggagcgagggaaagtccagcggaagcggctctgagtccaaatccaccggagggagccaggcttacttgcagcagtctggtgccgaactcgttagacctggagcctccgtgaagatgtcctgcaagacctccggctacaccttctccagctacaacatgcactgggtcaagcagacccctcggcaggctctggaatggatcggcgctatctatcctggcaacggcgacacctcctacaaccagaagttcaagggcaaagctaccctgaccgtggacaagtcctcctccaccgcttacatgcagctgtccagcctgacctctgaggactccgccgtgtacttctgcacccggtctaactactacggctcctccggctggtacttcgatgtgtggggaaccggaaccaccgtgacagtctcttct

SEQ ID NO: 1485 - protein, 743 aa, Artificial Sequence
  source: /note="Description of Artificial Sequence: Synthetic polypeptide"
DIQMTQSPSSLSASVGDRVTITCRARQSIGTAIHWYQQKPGKAPKLLIKYASESISGVPSRFSGSGSGTDFTLTISSLQPEDFATYYCQQSGSWPYTFGQGTKLEIKGGSEGKSSGSGSESKSTGGSEVQLVESGGGLVKPGGSLRLSCAASGFTFSRYNMNWVRQAPGKGLEWVSSISTSSNYIYYADSVKGRFTFSRDNAKNSLDLQMSGLRAEDTAIYYCTRGWGPFDYWGQGTLVTVSSEPKSSDKTHTCPPCPAPEAAGGPSVFLFPPKPKDTLMISRTPEVTCVVVSVSHEDPEVKFNWYVDGVEVHNAKTKPREEQYNSTYRVVSVLTVLHQDWLNGKEYKCKVSNKALPAPIEKTISKAKGQPREPQVYTLPPSREEMTKNQVSLWCLVKGFYPSDIAVEWESNGQPENNYKTTPPVLDSDGSFFLYSKLTVDKSRWQQGNVFSCSVMHEALHNHYTQKSLSLSPGKGGGGSGGGGSGGGGSGGGGSEIVLTQSPATLSLSPGERATLSCRASLSVSSMHWYQQKPGQAPRLLIYATSNLASGIPARFSGSGSGTDFTLTISSLEPEDFAVYYCQQWIFNPPTFGGGTKVEIKGGSEGKSSGSGSESKSTGGSQVQLVQSGAEVKKPGSSVKVSCKASGYTFSSYNMHWVRQAPGQGLEWMGAIYPGAGDTSYAQKFQGRVTITADESTSTAYMELSSLRSEDTAVYYCARSNYYGSSGWYFDVWGKGTTVTVSS

SEQ ID NO: 1486 - DNA, 2229 bp, Artificial Sequence
  source: /note="Description of Artificial Sequence: Synthetic polynucleotide"
gacatccagatgacccagtctccatcctctctgtccgcctctgtgggcgacagagtgaccattacctgccgggccagacagtctatcggcaccgctatccactggtatcagcagaagcctggcaaggcccctaagctgctgattaagtacgcctccgagtccatctccggcgtgccctccagattttctggctctggatctggcaccgactttaccctgacaatctccagcctgcagcctgaggacttcgccacctactactgtcagcagtccggctcttggccttacacctttggtcagggcaccaagctggaaatcaagggcggatctgagggaaagtccagcggctccggcagcgaaagcaagtccaccggcggaagcgaggtgcagctggttgaatctggcggaggactggttaagcctggcggctctctgagactgtcttgtgctgcttctggcttcaccttcagccggtacaacatgaactgggtccgacaggctcctggcaaaggcctggaatgggtgtcctccatctccacctccagcaactacatctactacgccgactccgtgaagggcagattcaccttctccagagacaacgccaagaactccctggacctgcagatgtctggcctgagagctgaggacaccgctatctactactgcaccagaggctggggacccttcgattattggggccagggaaccctggtcaccgtgtcatctgagcccaaatctagcgacaaaactcacacatgcccaccgtgcccagcacctgaagccgccgggggaccgtcagtcttcctcttccccccaaaacccaaggacaccctcatgatctcccggacccctgaggtcacatgcgtggtggtgagcgtgagccacgaagaccctgaggtcaagttcaactggtacgtggacggcgtggaggtgcataatgccaagacaaagccgcgggaggagcagtacaacagcacgtaccgtgtggtcagcgtcctcaccgtcctgcaccaggactggctgaatggcaaggagtacaagtgcaaggtgtcgaacaaagccctcccagcccccatcgagaaaaccatctccaaagccaaagggcagccccgagaaccacaggtgtacaccctgcccccatcccgggaggagatgaccaagaaccaggtcagcctgtggtgcctggtcaaaggcttctatcccagcgacatcgccgtggagtgggagagcaatgggcagccggagaacaactacaagaccacgcctcccgtgctggactccgacggctccttcttcctctacagcaagctcaccgtggacaagagcagatggcagcaggggaacgtcttctcatgctccgtgatgcatgaggctctgcacaaccactacacgcagaagtctctctccctgtctccgggaaaaggaggcggaggatctggcggaggtggaagtggcggaggcggttctggtggtggtggatctgagatcgtgctgacccagtctccagccacactgtcactgtctccaggcgagagagctaccctgtcctgtagagcctctctgtccgtgtcctccatgcactggtatcagcagaagcctggacaggcccctcggctgctgatctacgctacctctaatctggccagcggtatccccgccagattttctggttctggctctggcaccgactttaccctgaccatctccagcctggaacctgaggacttcgccgtgtactactgccagcagtggatcttcaaccctcctacctttggcggaggcaccaaggtggaaatcaagggagggagcgagggaaagtccagcggaagcggctctgagtccaaatccaccggagggagccaggttcaactggttcagtctggcgccgaagtgaagaaacctggctcctccgtgaaggtgtcctgcaaggcttccggctacaccttctccagctacaacatgcactgggtccgacaggcccctggacaaggattggaatggatgggcgctatctaccctggcgctggcgatacctcttacgcccagaaattccagggcagagtgaccatcaccgccgacgagtctacctccaccgcctacatggaactgtccagcctgagatctgaggacaccgccgtgtactactgcgcccggtctaattactacggctccagcggctggtacttcgacgtgtggggaaagggcaccaccgtgacagtctcttct

SEQ ID NO: 1487 - protein, 747 aa, Artificial Sequence
  source: /note="Description of Artificial Sequence: Synthetic polypeptide"
EIVLTQSPATLSASPGERVTLSCSASSSVSYMNWYQQKPGQAPRRWIYDSSKLASGVPARFSGSGSGRDYTLTISSLEPEDFAVYYCQQWSRNPPTFGGGTKVEIKGGSEGKSSGSGSESKSTGGSQVQLVQSGAEVKKPGSSVKVSCKASGYTFTRSTMHWVKQAPGQGLEWIGYINPSSAYTNYNQKFQGRVTLTADKSTSTAYMELSSLRSEDTAVYYCASPQVHYDYAGFPYWGQGTLVTVSSEPKSSDKTHTCPPCPAPEAAGGPSVFLFPPKPKDTLMISRTPEVTCVVVSVSHEDPEVKFNWYVDGVEVHNAKTKPREEQYNSTYRVVSVLTVLHQDWLNGKEYKCKVSNKALPAPIEKTISKAKGQPREPQVYTLPPSREEMTKNQVSLWCLVKGFYPSDIAVEWESNGQPENNYKTTPPVLDSDGSFFLYSKLTVDKSRWQQGNVFSCSVMHEALHNHYTQKSLSLSPGKGGGGSGGGGSGGGGSGGGGSEIVLTQSPATLSLSPGERATLSCRASLSVSSMHWYQQKPGQAPRLLIYATSNLASGIPARFSGSGSGTDFTLTISSLEPEDFAVYYCQQWIFNPPTFGGGTKVEIKGGSEGKSSGSGSESKSTGGSQVQLVQSGAEVKKPGSSVKVSCKASGYTFSSYNMHWVRQAPGQGLEWMGAIYPGAGDTSYAQKFQGRVTITADESTSTAYMELSSLRSEDTAVYYCARSNYYGSSGWYFDVWGKGTTVTVSS

SEQ ID NO: 1488 - DNA, 2241 bp, Artificial Sequence
  source: /note="Description of Artificial Sequence: Synthetic polynucleotide"
gagatcgtgctgacccagtctcctgccacactgagtgcttctccaggcgagagagtgaccctgtcctgctccgcttcctcctccgtgtcctacatgaactggtatcagcagaagcccggccaggctcctcggagatggatctacgactcttccaagctggcctctggtgtgccagccagattttctggctctggctccggcagagactataccctgaccatctccagcctggaacctgaggacttcgccgtgtactactgccagcagtggtctaggaaccctcctacctttggcggaggcaccaaggtggaaatcaagggcggatctgagggaaagtccagcggctccggcagcgaaagcaagtccaccggcggaagccaggttcaactggttcagtctggcgccgaagtgaagaaacctggctcctccgtcaaggtgtcctgcaaggcttccggctacacctttaccagatccaccatgcactgggtcaagcaggcccctggacaaggcttggagtggatcggctacatcaaccccagctccgcctacaccaactacaaccagaaattccagggcagagtgaccctgaccgccgacaagtctacctccaccgcctacatggaactgtccagcctgagatctgaggacaccgccgtgtactactgcgcctctcctcaggtccactacgactacgccggctttccttattggggccagggcacactggtcaccgtttcttctgagcccaaatctagcgacaaaactcacacatgcccaccgtgcccagcacctgaagccgccgggggaccgtcagtcttcctcttccccccaaaacccaaggacaccctcatgatctcccggacccctgaggtcacatgcgtggtggtgagcgtgagccacgaagaccctgaggtcaagttcaactggtacgtggacggcgtggaggtgcataatgccaagacaaagccgcgggaggagcagtacaacagcacgtaccgtgtggtcagcgtcctcaccgtcctgcaccaggactggctgaatggcaaggagtacaagtgcaaggtgtcgaacaaagccctcccagcccccatcgagaaaaccatctccaaagccaaagggcagccccgagaaccacaggtgtacaccctgcccccatcccgggaggagatgaccaagaaccaggtcagcctgtggtgcctggtcaaaggcttctatcccagcgacatcgccgtggagtgggagagcaatgggcagccggagaacaactacaagaccacgcctcccgtgctggactccgacggctccttcttcctctacagcaagctcaccgtggacaagagcagatggcagcaggggaacgtcttctcatgctccgtgatgcatgaggctctgcacaaccactacacgcagaagtctctctccctgtctccgggaaaaggaggcggaggatctggcggaggtggaagtggcggaggcggttctggtggtggtggatctgagatcgtgctgacccagtctccagccacactgtcactgtctccaggcgagagagctaccctgtcctgtagagcctctctgtccgtgtcctccatgcactggtatcagcagaagcctggacaggcccctcggctgctgatctacgctacctctaatctggccagcggtatccccgccagattttctggttctggctctggcaccgactttaccctgaccatctccagcctggaacctgaggacttcgccgtgtactactgccagcagtggatcttcaaccctcctacctttggcggaggcaccaaggtggaaatcaagggagggagcgagggaaagtccagcggaagcggctctgagtccaaatccaccggagggagccaggttcaactggttcagtctggcgccgaagtgaagaaacctggctcctccgtgaaggtgtcctgcaaggcttccggctacaccttctccagctacaacatgcactgggtccgacaggcccctggacaaggattggaatggatgggcgctatctaccctggcgctggcgatacctcttacgcccagaaattccagggcagagtgaccatcaccgccgacgagtctacctccaccgcctacatggaactgtccagcctgagatctgaggacaccgccgtgtactactgcgcccggtctaattactacggctccagcggctggtacttcgacgtgtggggaaagggcaccaccgtgacagtctcttct

SEQ ID NO: 1489 - protein, 451 aa, Artificial Sequence
  source: /note="Description of Artificial Sequence: Synthetic polypeptide"
QVQLQESGPGLVKPSETLSLTCSVSGASISSFYWSWIRQPADEGLEWIGRISPSGKTNYIPSLKSRIIMSLDASKNQFSLRLNSVTAADTAMYYCARGEYSGTYSYSFDVWGQGTMVTVSSASTKGPSVFPLAPSSKSTSGGTAALGCLVKDYFPEPVTVSWNSGALTSGVHTFPAVLQSSGLYSLSSVVTVPSSSLGTQTYICNVNHKPSNTKVDKKVEPKSCDKTHTCPPCPAPEAAGGPSVFLFPPKPKDTLMISRTPEVTCVVVSVSHEDPEVKFNWYVDGVEVHNAKTKPREEQYNSTYRVVSVLTVLHQDWLNGKEYKCKVSNKALPAPIEKTISKAKGQPREPQVYTLPPSREEMTKNQVSLSCAVKGFYPSDIAVEWESNGQPENNYKTTPPVLDSDGSFFLVSKLTVDKSRWQQGNVFSCSVMHEALHNRFTQKSLSLSPGK

SEQ ID NO: 1490 - DNA, 1353 bp, Artificial Sequence
  source: /note="Description of Artificial Sequence: Synthetic polynucleotide"
caggttcagctgcaagagtctggtcctggcctggtcaagccttccgagacactgtctctgacctgctctgtgtccggcgcctccatctcttccttctactggtcctggatccggcagcctgctgacgaaggactggaatggatcggccggatcagcccttctggcaagaccaactacatccccagcctgaagtcccggatcatcatgtccctggacgcctccaagaaccagttctccctgcggctgaactctgtgaccgctgccgataccgccatgtactactgtgccagaggcgagtactccggcacctactcctacagctttgacgtgtggggacaaggcaccatggtcacagtttcttctgcctccaccaagggcccatcggtcttccccctggcaccctcctccaagagcacctctgggggcacagcggccctgggctgcctggtcaaggactacttccccgaaccggtgacggtgtcgtggaactcaggcgccctgaccagcggcgtgcacaccttcccggctgtcctacagtcctcaggactctactccctcagcagcgtggtgaccgtgccctccagcagcttgggcacccagacctacatctgcaacgtgaatcacaagcccagcaacaccaaggtggacaagaaagttgagcccaaatcttgtgacaaaactcacacatgcccaccgtgcccagcacctgaagccgccgggggaccgtcagtcttcctcttccccccaaaacccaaggacaccctcatgatctcccggacccctgaggtcacatgcgtggtggtgagcgtgagccacgaagaccctgaggtcaagttcaactggtacgtggacggcgtggaggtgcataatgccaagacaaagccgcgggaggagcagtacaacagcacgtaccgtgtggtcagcgtcctcaccgtcctgcaccaggactggctgaatggcaaggagtacaagtgcaaggtgtcgaacaaagccctcccagcccccatcgagaaaaccatctccaaagccaaagggcagccccgagaaccacaggtgtacaccctgcccccatcccgggaggagatgaccaagaaccaggtcagcctgtcctgcgccgtcaaaggcttctatcccagcgacatcgccgtggagtgggagagcaatgggcagccggagaacaactacaagaccacgcctcccgtgctggactccgacggctccttcttcctcgtgagcaagctcaccgtggacaagagcagatggcagcaggggaacgtcttctcatgctccgtgatgcatgaggctctgcacaaccggttcacgcagaagtctctctccctgtctccgggaaaa

SEQ ID NO: 1491 - protein, 220 aa, Artificial Sequence
  source: /note="Description of Artificial Sequence: Synthetic polypeptide"
DIVMTQSPLSLSVTPGEPASISCRSSESLLDSEDGNTYLDWFLQKPGQSPQLLIYTLSYRASGVPDRFSGSGSDTDFTLHISSLEAEDVGLYYCMQRMEFPLTFGQGTKVEIKRTVAAPSVFIFPPSDEQLKSGTASVVCLLNNFYPREAKVQWKVDNALQSGNSQESVTEQDSKDSTYSLSSTLTLSKADYEKHKVYACEVTHQGLSSPVTKSFNRGEC

SEQ ID NO: 1492 - DNA, 660 bp, Artificial Sequence
  source: /note="Description of Artificial Sequence: Synthetic polynucleotide"
gacatcgtgatgacccagtctccactgagcctgtctgtgacacctggcgagcctgcctccatctcctgtagatcttctgagtccctgctggacagcgaggacggcaatacctacctggactggttcctgcagaagcccggacagtctcctcagctgctgatctacaccctgtcctacagagcctctggcgtgcccgatagattctccggctctggctctgacaccgactttaccctgcacatctccagcctggaagccgaggatgtgggcctgtactactgtatgcagcggatggaatttcccctgaccttcggccagggcaccaaggtggaaatcaagcgcaccgtggccgcccctagcgtgtttatcttccctccctcggatgagcagcttaagtcaggcaccgcatccgtggtctgcctgctcaacaacttctacccgagggaagccaaagtgcagtggaaagtggacaacgcgctccagtcgggaaactcccaggagtccgtgaccgaacaggactccaaggacagcacttattccctgtcctccactctgacgctgtcaaaggccgactacgagaagcacaaggtctacgcctgcgaagtgacccatcaggggctttcctcgcccgtgactaagagcttcaatcggggcgaatgc

SEQ ID NO: 1493 - protein, 449 aa, Artificial Sequence
  source: /note="Description of Artificial Sequence: Synthetic polypeptide"
QVQLQQSGPGLVKPSQTLSLTCAISGDSVSSNSATWNWIRQSPSRGLEWLGRTYYRSKWYNDYTVSVKSRITINPDTSKNQFSLQLNSVTPEDTAVYYCTRVDIAFDYWGQGTLVTVSSASTKGPSVFPLAPSSKSTSGGTAALGCLVKDYFPEPVTVSWNSGALTSGVHTFPAVLQSSGLYSLSSVVTVPSSSLGTQTYICNVNHKPSNTKVDKKVEPKSCDKTHTCPPCPAPEAAGGPSVFLFPPKPKDTLMISRTPEVTCVVVSVSHEDPEVKFNWYVDGVEVHNAKTKPREEQYNSTYRVVSVLTVLHQDWLNGKEYKCKVSNKALPAPIEKTISKAKGQPREPQVYTLPPSREEMTKNQVSLSCAVKGFYPSDIAVEWESNGQPENNYKTTPPVLDSDGSFFLVSKLTVDKSRWQQGNVFSCSVMHEALHNRFTQKSLSLSPGK

SEQ ID NO: 1494 - DNA, 1347 bp, Artificial Sequence
  source: /note="Description of Artificial Sequence: Synthetic polynucleotide"
caggttcagctgcagcagtctggccctggactggtcaagccctctcagaccctgtctctgacctgtgccatctccggcgactccgtgtcctctaattctgccacctggaactggatccggcagtcccctagtagaggcctggaatggctgggcagaacctactaccggtccaagtggtacaacgactacaccgtgtccgtgaagtcccggatcaccatcaatcccgacacctccaagaaccagttctccctgcagctcaacagcgtgacccctgaggataccgccgtgtactactgcaccagagtggatatcgccttcgactactggggccagggcacactggttaccgtttcttctgcctccaccaagggcccatcggtcttccccctggcaccctcctccaagagcacctctgggggcacagcggccctgggctgcctggtcaaggactacttccccgaaccggtgacggtgtcgtggaactcaggcgccctgaccagcggcgtgcacaccttcccggctgtcctacagtcctcaggactctactccctcagcagcgtggtgaccgtgccctccagcagcttgggcacccagacctacatctgcaacgtgaatcacaagcccagcaacaccaaggtggacaagaaagttgagcccaaatcttgtgacaaaactcacacatgcccaccgtgcccagcacctgaagccgccgggggaccgtcagtcttcctcttccccccaaaacccaaggacaccctcatgatctcccggacccctgaggtcacatgcgtggtggtgagcgtgagccacgaagaccctgaggtcaagttcaactggtacgtggacggcgtggaggtgcataatgccaagacaaagccgcgggaggagcagtacaacagcacgtaccgtgtggtcagcgtcctcaccgtcctgcaccaggactggctgaatggcaaggagtacaagtgcaaggtgtcgaacaaagccctcccagcccccatcgagaaaaccatctccaaagccaaagggcagccccgagaaccacaggtgtacaccctgcccccatcccgggaggagatgaccaagaaccaggtcagcctgtcctgcgccgtcaaaggcttctatcccagcgacatcgccgtggagtgggagagcaatgggcagccggagaacaactacaagaccacgcctcccgtgctggactccgacggctccttcttcctcgtgagcaagctcaccgtggacaagagcagatggcagcaggggaacgtcttctcatgctccgtgatgcatgaggctctgcacaaccggttcacgcagaagtctctctccctgtctccgggaaaa

SEQ ID NO: 1495 - protein, 216 aa, Artificial Sequence
  source: /note="Description of Artificial Sequence: Synthetic polypeptide"
QTVVTQPPSVSEAPRQRVTISCSGSSSNIGNHGVNWYQQLPGKAPKLLIYNDDLLPSGVSDRFSGSTSGTSGSLAISGLQSEDEADYYCAAWDDSLNGVVFGGGTKLTVLGQPKAAPSVTLFPPSSEELQANKATLVCLISDFYPGAVTVAWKADSSPVKAGVETTTPSKQSNNKYAASSYLSLTPEQWKSHRSYSCQVTHEGSTVEKTVAPTECS

SEQ ID NO: 1496 - DNA, 648 bp, Artificial Sequence
  source: /note="Description of Artificial Sequence: Synthetic polynucleotide"
cagacagtggtcacccagcctccatctgtgtctgaggcccctagacagagagtgaccatctcctgctccggctcctcctccaacatcggcaatcatggcgtgaactggtatcagcagctgcccggcaaggctcccaaactgctgatctacaacgacgacctgctgccttctggcgtgtccgacagattctccggctctacctctggcacctctggatccctggctatctctggcctgcagtctgaggacgaggccgactactattgtgccgcctgggacgattctctgaacggcgttgtgtttggcggaggcaccaagctgacagtgttgggacagcctaaggcagccccctccgtgaccctgttcccgccatcatccgaagaactgcaggccaacaaggccacgctcgtgtgcctgatttccgacttctacccgggggccgtgactgtggcctggaaggcagactcaagccctgtgaaggctggcgtcgagactaccaccccgtcgaagcaatccaacaacaaatacgcggcgtccagctacctgagcctgacccctgagcagtggaaatcccaccggtcctactcgtgccaagtcacccacgagggatccactgtggaaaagaccgtggcgccgactgagtgttcc

SEQ ID NO: 1497 - protein, 451 aa, Artificial Sequence
  source: /note="Description of Artificial Sequence: Synthetic polypeptide"
QVQLQESGPGLVKPSQTLSLTCTVSGVSISNYYWSWIRQPPGKGLEWIGRISPSGRTNYNPSLKSRVTMSLDASKNQFSLKLSSVTAADTAVYYCARGEYSGTYSYSFDIWGQGTMVTVSSASTKGPSVFPLAPSSKSTSGGTAALGCLVKDYFPEPVTVSWNSGALTSGVHTFPAVLQSSGLYSLSSVVTVPSSSLGTQTYICNVNHKPSNTKVDKKVEPKSCDKTHTCPPCPAPEAAGGPSVFLFPPKPKDTLMISRTPEVTCVVVSVSHEDPEVKFNWYVDGVEVHNAKTKPREEQYNSTYRVVSVLTVLHQDWLNGKEYKCKVSNKALPAPIEKTISKAKGQPREPQVYTLPPSREEMTKNQVSLSCAVKGFYPSDIAVEWESNGQPENNYKTTPPVLDSDGSFFLVSKLTVDKSRWQQGNVFSCSVMHEALHNRFTQKSLSLSPGK

SEQ ID NO: 1498 - DNA, 1353 bp, Artificial Sequence
  source: /note="Description of Artificial Sequence: Synthetic polynucleotide"
caggttcagctgcaagagtctggccctggcctggtcaagccctctcagaccctgtctctgacctgtaccgtgtccggcgtgtccatctccaactactactggtcctggatccggcagcctcctggcaaaggactggaatggatcggccgcatctctccttctggtcgcaccaactacaaccccagcctgaaaagcagagtgaccatgtctctggacgcctccaagaaccagttctccctgaagctgtcctccgtgaccgctgctgataccgccgtgtactactgtgccagaggcgagtactccggcacctactcctacagcttcgacatctggggccagggcaccatggtcacagtctcttctgcctccaccaagggcccatcggtcttccccctggcaccctcctccaagagcacctctgggggcacagcggccctgggctgcctggtcaaggactacttccccgaaccggtgacggtgtcgtggaactcaggcgccctgaccagcggcgtgcacaccttcccggctgtcctacagtcctcaggactctactccctcagcagcgtggtgaccgtgccctccagcagcttgggcacccagacctacatctgcaacgtgaatcacaagcccagcaacaccaaggtggacaagaaagttgagcccaaatcttgtgacaaaactcacacatgcccaccgtgcccagcacctgaagccgccgggggaccgtcagtcttcctcttccccccaaaacccaaggacaccctcatgatctcccggacccctgaggtcacatgcgtggtggtgagcgtgagccacgaagaccctgaggtcaagttcaactggtacgtggacggcgtggaggtgcataatgccaagacaaagccgcgggaggagcagtacaacagcacgtaccgtgtggtcagcgtcctcaccgtcctgcaccaggactggctgaatggcaaggagtacaagtgcaaggtgtcgaacaaagccctcccagcccccatcgagaaaaccatctccaaagccaaagggcagccccgagaaccacaggtgtacaccctgcccccatcccgggaggagatgaccaagaaccaggtcagcctgtcctgcgccgtcaaaggcttctatcccagcgacatcgccgtggagtgggagagcaatgggcagccggagaacaactacaagaccacgcctcccgtgctggactccgacggctccttcttcctcgtgagcaagctcaccgtggacaagagcagatggcagcaggggaacgtcttctcatgctccgtgatgcatgaggctctgcacaaccggttcacgcagaagtctctctccctgtctccgggaaaa

SEQ ID NO: 1499 - protein, 220 aa, Artificial Sequence
  source: /note="Description of Artificial Sequence: Synthetic polypeptide"
DIQMTQSPSSLSASVGDRVTITCRSSQSLFDSDDGNTYLDWFQQKPGQSPKLLIQTLSYRASGVPSRFSGSGSGTDFTLTISSLQPEDFATYYCMQRMEFPLTFGGGTKVEIKRTVAAPSVFIFPPSDEQLKSGTASVVCLLNNFYPREAKVQWKVDNALQSGNSQESVTEQDSKDSTYSLSSTLTLSKADYEKHKVYACEVTHQGLSSPVTKSFNRGEC

SEQ ID NO: 1500 - DNA, 660 bp, Artificial Sequence
  source: /note="Description of Artificial Sequence: Synthetic polynucleotide"
gacatccagatgacccagtctccatcctctctgtccgcctctgtgggcgacagagtgaccatcacctgtcggtcctctcagtccctgttcgactctgacgacggcaacacctacctggactggttccagcagaagcccggccagtctcctaagctgctgatccagacactgtcctacagagcctctggcgtgccctccagattttccggctctggctctggcaccgactttaccctgacaatctccagcctgcagcctgaggacttcgccacctactactgtatgcagcggatggaatttcccctgaccttcggcggaggcaccaaggtggaaatcaagcgcaccgtggccgcccctagcgtgtttatcttccctccctcggatgagcagcttaagtcaggcaccgcatccgtggtctgcctgctcaacaacttctacccgagggaagccaaagtgcagtggaaagtggacaacgcgctccagtcgggaaactcccaggagtccgtgaccgaacaggactccaaggacagcacttattccctgtcctccactctgacgctgtcaaaggccgactacgagaagcacaaggtctacgcctgcgaagtgacccatcaggggctttcctcgcccgtgactaagagcttcaatcggggcgaatgc

SEQ ID NO: 1501 - DNA, 660 bp, Artificial Sequence
  source: /note="Description of Artificial Sequence: Synthetic polynucleotide"
gacatccagatgacccagagccctagcagcctgagcgccagcgtgggcgacagagtgaccattacctgcagaagcagccagagcctgttcgacagcgacgacggcaatacctacctggactggttccagcagaagcctggccagagccctaagctgctgatccagaccctgagctacagagccagcggcgtgcctagcagattctccggcagcggctccggcaccgacttcaccctgaccatcagcagcctgcagcctgaggacttcgccacctactactgcatgcagagaatggagttccctctgaccttcggcggcggcaccaaggtggagatcaagcgtacggtggctgcaccatctgtcttcatcttcccgccatctgatgagcagttgaaatctggaactgcctctgttgtgtgcctgctgaataacttctatcccagagaggccaaagtacagtggaaggtggataacgccctccaatcgggtaactcccaggagagtgtcacagagcaggacagcaaggacagcacctacagcctcagcagcaccctgacgctgagcaaagcagactacgagaaacacaaagtctacgcctgcgaagtcacccatcagggcctgagctcgcccgtcacaaagagcttcaacaggggagagtgt

SEQ ID NO: 1502 - protein, 451 aa, Artificial Sequence
  source: /note="Description of Artificial Sequence: Synthetic polypeptide"
QVQLQESGPGLVKPSQTLSLTCTVSGVSISNYYWSWIRQPPGKGLEWIGRISPSGRTNYNPSLKSRVTMSLDASKNQFSLKLSSVTAADTAVYYCARGEYSGTYSYSFDIWGQGTMVTVSSASTKGPSVFPLAPSSKSTSGGTAALGCLVKDYFPEPVTVSWNSGALTSGVHTFPAVLQSSGLYSLSSVVTVPSSSLGTQTYICNVNHKPSNTKVDKKVEPKSCDKTHTCPPCPAPEAAGGPSVFLFPPKPKDTLMISRTPEVTCVVVSVSHEDPEVKFNWYVDGVEVHNAKTKPREEQYNSTYRVVSVLTVLHQDWLNGKEYKCKVSNKALPAPIEKTISKAKGQPREPQVYTLPPSREEMTKNQVSLWCLVKGFYPSDIAVEWESNGQPENNYKTTPPVLDSDGSFFLYSKLTVDKSRWQQGNVFSCSVMHEALHNHYTQKSLSLSPGK

SEQ ID NO: 1503 - DNA, 1353 bp, Artificial Sequence
  source: /note="Description of Artificial Sequence: Synthetic polynucleotide"
caggttcagctgcaagagtctggccctggcctggtcaagccctctcagaccctgtctctgacctgtaccgtgtccggcgtgtccatctccaactactactggtcctggatccggcagcctcctggcaaaggactggaatggatcggccgcatctctccttctggtcgcaccaactacaaccccagcctgaaaagcagagtgaccatgtctctggacgcctccaagaaccagttctccctgaagctgtcctccgtgaccgctgctgataccgccgtgtactactgtgccagaggcgagtactccggcacctactcctacagcttcgacatctggggccagggcaccatggtcacagtctcttctgcctccaccaagggcccatcggtcttccccctggcaccctcctccaagagcacctctgggggcacagcggccctgggctgcctggtcaaggactacttccccgaaccggtgacggtgtcgtggaactcaggcgccctgaccagcggcgtgcacaccttcccggctgtcctacagtcctcaggactctactccctcagcagcgtggtgaccgtgccctccagcagcttgggcacccagacctacatctgcaacgtgaatcacaagcccagcaacaccaaggtggacaagaaagttgagcccaaatcttgtgacaaaactcacacatgcccaccgtgcccagcacctgaagccgccgggggaccgtcagtcttcctcttccccccaaaacccaaggacaccctcatgatctcccggacccctgaggtcacatgcgtggtggtgagcgtgagccacgaagaccctgaggtcaagttcaactggtacgtggacggcgtggaggtgcataatgccaagacaaagccgcgggaggagcagtacaacagcacgtaccgtgtggtcagcgtcctcaccgtcctgcaccaggactggctgaatggcaaggagtacaagtgcaaggtgtcgaacaaagccctcccagcccccatcgagaaaaccatctccaaagccaaagggcagccccgagaaccacaggtgtacaccctgcccccatcccgggaggagatgaccaagaaccaggtcagcctgtggtgcctggtcaaaggcttctatcccagcgacatcgccgtggagtgggagagcaatgggcagccggagaacaactacaagaccacgcctcccgtgctggactccgacggctccttcttcctctacagcaagctcaccgtggacaagagcagatggcagcaggggaacgtcttctcatgctccgtgatgcatgaggctctgcacaaccactacacgcagaagtctctctccctgtctccgggaaaa

SEQ ID NO: 1504 - protein, 479 aa, Artificial Sequence; identical to SEQ ID NO: 1455
  source: /note="Description of Artificial Sequence: Synthetic polypeptide"

SEQ ID NO: 1505 - DNA, 1437 bp, Artificial Sequence
  source: /note="Description of Artificial Sequence: Synthetic polynucleotide"
gagatcgtgctgacccagtctcctgccacactgagtgcttctccaggcgagagagtgaccctgtcctgctccgcttcctcctccgtgtcctacatgaactggtatcagcagaagcccggccaggctcctcggagatggatctacgactcttccaagctggcctctggtgtgccagccagattttctggctctggctccggcagagactataccctgaccatctccagcctggaacctgaggacttcgccgtgtactactgccagcagtggtctaggaaccctcctacctttggcggaggcaccaaggtggaaatcaagggcggatctgagggaaagtccagcggctccggcagcgaaagcaagtccaccggcggaagccaggttcaactggttcagtctggcgccgaagtgaagaaacctggctcctccgtcaaggtgtcctgcaaggcttccggctacacctttaccagatccaccatgcactgggtcaagcaggcccctggacaaggcttggagtggatcggctacatcaaccccagctccgcctacaccaactacaaccagaaattccagggcagagtgaccctgaccgccgacaagtctacctccaccgcctacatggaactgtccagcctgagatctgaggacaccgccgtgtactactgcgcctctcctcaggtccactacgactacgccggctttccttattggggccagggcacactggtcaccgtttcttctgagcccaaatctagcgacaaaactcacacatgcccaccgtgcccagcacctgaagccgccgggggaccgtcagtcttcctcttccccccaaaacccaaggacaccctcatgatctcccggacccctgaggtcacatgcgtggtggtgagcgtgagccacgaagaccctgaggtcaagttcaactggtacgtggacggcgtggaggtgcataatgccaagacaaagccgcgggaggagcagtacaacagcacgtaccgtgtggtcagcgtcctcaccgtcctgcaccaggactggctgaatggcaaggagtacaagtgcaaggtgtcgaacaaagccctcccagcccccatcgagaaaaccatctccaaagccaaagggcagccccgagaaccacaggtgtacaccctgcccccatcccgggaggagatgaccaagaaccaggtcagcctgtggtgcctggtcaaaggcttctatcccagcgacatcgccgtggagtgggagagcaatgggcagccggagaacaactacaagaccacgcctcccgtgctggactccgacggctccttcttcctctacagcaagctcaccgtggacaagagcagatggcagcaggggaacgtcttctcatgctccgtgatgcatgaggctctgcacaaccactacacgcagaagtctctctccctgtctccgggaaaa

SEQ ID NO: 1506 - protein, 479 aa, Artificial Sequence
  source: /note="Description of Artificial Sequence: Synthetic polypeptide"
EIVLTQSPATLSASPGERVTLSCSASSSVSYMNWYQQKPGQAPRRWIYDSSKLASGVPARFSGSGSGRDYTLTISSLEPEDFAVYYCQQWSRNPPTFGGGTKVEIKGGSEGKSSGSGSESKSTGGSQVQLVQSGAEVKKPGSSVKVSCKASGYTFTRSTMHWVRQAPGQGLEWMGYINPSSAYTNYAQKFQGRVTLTADKSTSTAYMELSSLRSEDTAVYYCASPQVHYDYGGFPYWGQGTLVTVSSEPKSSDKTHTCPPCPAPEAAGGPSVFLFPPKPKDTLMISRTPEVTCVVVSVSHEDPEVKFNWYVDGVEVHNAKTKPREEQYNSTYRVVSVLTVLHQDWLNGKEYKCKVSNKALPAPIEKTISKAKGQPREPQVYTLPPSREEMTKNQVSLWCLVKGFYPSDIAVEWESNGQPENNYKTTPPVLDSDGSFFLYSKLTVDKSRWQQGNVFSCSVMHEALHNHYTQKSLSLSPGK

SEQ ID NO: 1507 - DNA, 1437 bp, Artificial Sequence
  source: /note="Description of Artificial Sequence: Synthetic polynucleotide"
gagatcgtgctgacccagtctcctgccacactgagtgcttctccaggcgagagagtgaccctgtcctgctccgcttcctcctccgtgtcctacatgaactggtatcagcagaagcccggccaggctcctcggagatggatctacgactcttccaagctggcctctggtgtgccagccagattttctggctctggctccggcagagactataccctgaccatctccagcctggaacctgaggacttcgccgtgtactactgccagcagtggtctaggaaccctcctacctttggcggaggcaccaaggtggaaatcaagggcggatctgagggaaagtccagcggctccggcagcgaaagcaagtccaccggcggaagccaggttcaactggttcagtctggcgccgaagtgaagaaacctggctcctccgtgaaagtgtcctgcaaggcttccggctacacttttaccagatccaccatgcactgggtccgacaggctccaggacaaggcttggagtggatgggctacatcaaccccagctccgcctacaccaactacgcccagaaattccagggcagagtgaccctgaccgccgacaagtctacctccaccgcctacatggaactgtccagcctgagatctgaggacaccgccgtgtactactgcgcttctcctcaggtgcactacgactacggcggctttccttattggggccagggcacactggtcaccgtttcttctgagcccaaatctagcgacaaaactcacacatgcccaccgtgcccagcacctgaagccgccgggggaccgtcagtcttcctcttccccccaaaacccaaggacaccctcatgatctcccggacccctgaggtcacatgcgtggtggtgagcgtgagccacgaagaccctgaggtcaagttcaactggtacgtggacggcgtggaggtgcataatgccaagacaaagccgcgggaggagcagtacaacagcacgtaccgtgtggtcagcgtcctcaccgtcctgcaccaggactggctgaatggcaaggagtacaagtgcaaggtgtcgaacaaagccctcccagcccccatcgagaaaaccatctccaaagccaaagggcagccccgagaaccacaggtgtacaccctgcccccatcccgggaggagatgaccaagaaccaggtcagcctgtggtgcctggtcaaaggcttctatcccagcgacatcgccgtggagtgggagagcaatgggcagccggagaacaactacaagaccacgcctcccgtgctggactccgacggctccttcttcctctacagcaagctcaccgtggacaagagcagatggcagcaggggaacgtcttctcatgctccgtgatgcatgaggctctgcacaaccactacacgcagaagtctctctccctgtctccgggaaaa

SEQ ID NO: 1508 - protein, 96 aa, Homo sapiens
QDGNEEMGGITQTPYKVSISGTTVILTCPQYPGSEILWQHNDKNIGGDEDDKNIGSDEDHLSLKEFSELEQSGYYVCYPRGSKPEDANFYLYLRAR

SEQ ID NO: 1509 - protein, 96 aa, Artificial Sequence; identical to SEQ ID NO: 1508
  source: /note="Description of Artificial Sequence: Synthetic polypeptide"

SEQ ID NO: 1510 - protein, 713 aa, Artificial Sequence
  source: /note="Description of Artificial Sequence: Synthetic polypeptide"
  MOD_RES (39)..(39): Glycosylated Asn
  MOD_RES (84)..(84): Glycosylated Asn
  MOD_RES (103)..(103): Glycosylated Asn
  MOD_RES (116)..(116): Glycosylated Asn
  MOD_RES (158)..(158): Glycosylated Asn
  MOD_RES (299)..(299): Glycosylated Asn
  MOD_RES (422)..(422): Glycosylated Asn
  MOD_RES (439)..(439): Glycosylated Asn
  MOD_RES (601)..(601): Glycosylated Asn
HHHHHHKSSNEATNITPKHNMKAFLDELKAENIKKFLYXFTQIPHLAGTEQNFQLAKQIQSQWKEFGLDSVELAHYDVLLSYPXKTHPNYISIINEDGNEIFXTSLFEPPPPGYEXVSDIVPPFSAFSPQGMPEGDLVYVNYARTEDFFKLERDMKIXCSGKIVIARYGKVFRGNKVKNAQLAGAKGVILYSDPADYFAPGVKSYPDGWNLPGGGVQRGNILNLNGAGDPLTPGYPANEYAYRRGIAEAVGLPSIPVHPIGYYDAQKLLEKMGGSAPPDSSWRGSLKVPYNVGPGFTGXFSTQKVKMHIHSTNEVTRIYNVIGTLRGAVEPDRYVILGGHRDSWVFGGIDPQSGAAVVHEIVRSFGTLKKEGWRPRRTILFASWDAEEFGLLGSTEWAEENSRLLQERGVAYINADSSIEGXYTLRVDCTPLMYSLVHXLTKELKSPDEGFEGKSLYESWTKKSPSPEFSGMPRISKLGSGNDFEVFFQRLGIASGRARYTKNWETNKFSGYPLYHSVYETYELVEKFYDPMFKYHLTVAQVRGGMVFELANSIVLPFDCRDYAVVLRKYADKIYSISMKHPQEMKTYSVSFDSLFSAVKXFTEIASKFSERLQDFDKSNPIVLRMMNDQLMFLERAFIDPLGLPDRPFYRHVIYAPSSHNKYAGESFPGIYDALFDIESKVDPSKAWGEVKRQIYVAAFTVQAAAETLSEVA
